(19) United States
(12) Patent Application Publication
(10) Pub. No.: US 2019/0010495 A1
(43) Pub. Date: Jan. 10, 2019

(54) COMPOSITIONS AND METHODS FOR THE TREATMENT OF HEMOGLOBINOPATHIES

(71) Applicants: NOVARTIS AG, Basel (CH); INTELLIA THERAPEUTICS, INC., Cambridge, MA (US)

(72) Inventors: Anthony Edward BOITANO, Waban, MA (US); Michael COOKE, San Diego, CA (US); Lloyd B. KLICKSTEIN, Newton, MA (US); Reynald LESCARBEAU, Cambridge, MA (US); Craig Stephen MICKANIN, Hopkinton, MA (US); Kabungo MULUMBA, Cambridge, MA (US); Seshidhar Reddy POLICE, Burlington, MA (US); Jennifer SNEAD, San Diego, CA (US); Susan C. STEVENSON, Ashland, MA (US); Morag STEWART, Cambridge, MA (US); Yi YANG, Belmont, MA (US)

(73) Assignees: NOVARTIS AG, Basel (CH); INTELLIA THERAPEUTICS, INC., Cambridge, MA (US)

(21) Appl. No.: 16/066,617

(22) PCT Filed: Dec. 26, 2016
(86) PCT No.: PCT/IB2016/058007

§ 371 Date: Jun. 27, 2018

Related U.S. Application Data
(60) Provisional application No. 62/347,484, filed on Jun. 8, 2016.
(60) Provisional application No. 62/271,968, filed on Dec. 28, 2015.

(51) Int. Cl. C12N 15/113; A61P 7/00; A61K 35/15

(52) U.S. Cl. CPC C12N 15/113; A61P 7/00; A61K 35/15; C12N 2310/322; C12N 2310/315; C12N 2310/321; C12N 2310/20

(57) ABSTRACT

The present invention is directed to genome editing systems, reagents and methods for the treatment of hemoglobinopathies.

### RELATED APPLICATIONS

[0001] This application claims priority to U.S. Provisional patent application No. 62/271,968, filed Dec. 28, 2015, and U.S. Provisional patent application No. 62/347,484, filed Jun. 8, 2016. The entire contents of these applications are incorporated herein by reference.

### BACKGROUND

[0002] CRISPRs (Clustered Regularly Interspaced Short Palindromic Repeats) evolved in bacteria as an adaptive immune system to defend against viral attack. Upon exposure to a virus, short segments of viral DNA are integrated into the CRISPR locus of the bacterial genome. RNA is transcribed from a portion of the CRISPR locus that includes the viral sequence. That RNA, which contains sequence complimentary to the viral genome, mediates targeting of a Cas9 protein to the sequence in the viral genome. The Cas9 protein cleaves and thereby silences the viral target.

[0003] Recently, the CRISPR/Cas system has been adapted for genome editing in eukaryotic cells. The introduction of site-specific single (SSBs) or double strand breaks (DSBs) allows for target sequence alteration through, for example, non-homologous end joining (NHEJ) or homology-directed repair (HDR).

### SUMMARY OF THE INVENTION

[0004] Without being bound by theory, the invention is based in part on the discovery that CRISPR systems, e.g., Cas9 CRISPR systems, e.g., as described herein, can be used to modify cells (e.g., hematopoietic stem and progenitor cells (HSPCs)) to increase fetal hemoglobin (HbF) expression and/or decrease expression of beta globin (e.g., a beta globin gene having a disease-causing mutation), and that such cells may be used to treat hemoglobinopathies, e.g., sickle cell disease and beta thalassemia.

[0005] Thus, in an aspect, the invention provides CRISPR systems (e.g., Cas CRISPR systems, e.g., Cas9 CRISPR systems, e.g., S. pyogenes Cas9 CRISPR systems) comprising one or more, e.g., one, gRNA molecule as described herein. Any of the gRNA molecules described herein may be used in such systems, and in the methods and cells described herein.

[0006] In an aspect, the invention provides a gRNA molecule that includes a tracr and crRNA, wherein the crRNA includes a targeting domain that is complementary with a target sequence of the BCL11A gene, a BCL11a enhancer, or a HFPH region.

[0007] In another aspect, the invention provides a gRNA molecule that includes a targeting domain that is complementary with a target sequence of the BCL11A gene, e.g., is complementary with a target sequence within a BCL11a coding region (e.g., within a BCL11a exon, e.g., within BCL11a exon 2). In embodiments, the gRNA comprises a targeting domain that includes, e.g., consists of, any one of SEQ ID NO: 1 to SEQ ID NO: 85 or SEQ ID NO: 400 to SEQ ID NO: 1231.

[0008] In another aspect, the invention provides a gRNA molecule that includes a targeting domain that is complementary with a target sequence of a BCL11A enhancer.

[0009] In embodiments, the gRNA comprises a targeting domain that includes, e.g., consists of, any one of SEQ ID NO: 1232 to SEQ ID NO: 1499.

[0010] In embodiments, the gRNA to a target sequence of a BCL11a enhancer is to a target sequence within the +58 region of the BCL11a enhancer, and the targeting domain includes, e.g., consists of, any one of SEQ ID NO: 182 to SEQ ID NO: 277 or SEQ ID NO: 334 to SEQ ID NO: 341. In embodiments, the targeting domain includes, e.g., consists of, any one of SEQ ID NO: 341, SEQ ID NO: 246, SEQ ID NO: 248, SEQ ID NO: 247, SEQ ID NO: 245, SEQ ID NO: 249, SEQ ID NO: 244, SEQ ID NO: 199, SEQ ID NO: 251, SEQ ID NO: 250, SEQ ID NO: 334, SEQ ID NO: 185, SEQ ID NO: 186, SEQ ID NO: 336, or SEQ ID NO: 337. In embodiments, the targeting domain includes, e.g., consists of, SEQ ID NO: 248. In embodiments, the targeting domain includes, e.g., consists of, SEQ ID NO: 247. In embodiments, the targeting domain includes, e.g., consists of, SEQ ID NO: 245. In embodiments, the targeting domain includes, e.g., consists of, SEQ ID NO: 336. In embodiments, the targeting domain includes, e.g., consists of, SEQ ID NO: 337. In embodiments, the targeting domain includes, e.g., consists of, SEQ ID NO: 338. In embodiments, the targeting domain includes, e.g., consists of, SEQ ID NO: 335. In embodiments, the targeting domain includes, e.g., consists of, SEQ ID NO: 252. In an embodiment, the gRNA is a dgRNA that includes a crRNA that includes, e.g., consists of, e.g., from 5′ to 3′, SEQ ID NO: 248-SEQ ID NO: 6607, and a tracr that includes, e.g., consists of, e.g., from 5′ to 3′, SEQ ID NO: 6660. In an embodiment, the gRNA is a dgRNA that includes a crRNA that includes, e.g., consists of, e.g., from 5′ to 3′, SEQ ID NO: 247-SEQ ID NO: 6607, and a tracr that includes, e.g., consists of, e.g., from 5′ to 3′, SEQ ID NO: 6660. In an embodiment, the gRNA molecule is a sgRNA molecule and includes, e.g., consists of, e.g., from 5′ to 3′, SEQ ID NO: 338-SEQ ID NO: 6604-UUUU. In an embodiment, the gRNA molecule is a sgRNA molecule and includes, e.g., consists of, e.g., from 5′ to 3′, SEQ ID NO: 335-SEQ ID NO: 6604-UUUU. In an embodiment, the gRNA molecule is a sgRNA molecule and includes, e.g., consists of, e.g., from 5′ to 3′, SEQ ID NO: 336-SEQ ID NO: 6604-UUUU. In an embodiment, the gRNA molecule is a sgRNA molecule and includes, e.g., consists of, e.g., from 5′ to 3′, SEQ ID NO: 245-SEQ ID NO: 6604-UUUU. In an embodiment, the gRNA molecule is a sgRNA molecule and includes, e.g., consists of, e.g., from 5′ to 3′, SEQ ID NO: 337-SEQ ID NO: 6604-UUUU. In an embodiment, the gRNA molecule is a sgRNA molecule and includes, e.g., consists of, e.g., from 5′ to 3′, SEQ ID NO: 252-SEQ ID NO: 6604-UUUU.

[0011] In embodiments, the gRNA to a target sequence of a BCL11a enhancer is to a target sequence within the +62 region of the BCL11a enhancer, and the targeting domain includes, e.g., consists of, any one of SEQ ID NO: 278 to SEQ ID NO: 333. In embodiments, the targeting domain includes, e.g., consists of, any one of SEQ ID NO: 318, SEQ ID NO: 312, SEQ ID NO: 313, SEQ ID NO: 294, SEQ ID NO: 310, SEQ ID NO: 319, SEQ ID NO: 298, SEQ ID NO: 322, SEQ ID NO: 311, SEQ ID NO: 315, SEQ ID NO: 290, SEQ ID NO: 317, SEQ ID NO: 309, SEQ ID NO: 289, or SEQ ID NO: 281. In embodiments, the targeting domain includes, e.g., consists of, SEQ ID NO: 318.

[0012] In embodiments, the gRNA to a target sequence of a BCL11a enhancer is to a target sequence within the +55 region of the BCL11a enhancer, and the targeting domain includes, e.g., consists of, any one of SEQ ID NO: 1596 to SEQ ID NO: 1691. In embodiments, the targeting domain includes, e.g., consists of, any one of SEQ ID NO: 1683, SEQ ID NO: 1638, SEQ ID NO: 1647, SEQ ID NO: 1609, SEQ ID NO: 1621, SEQ ID NO: 1617, SEQ ID NO: 1654, SEQ ID NO: 1631, SEQ ID NO: 1620, SEQ ID NO: 1637, SEQ ID NO: 1612, SEQ ID NO: 1656, SEQ ID NO: 1619, SEQ ID NO: 1675, SEQ ID NO: 1645, SEQ ID NO: 1598, SEQ ID NO: 1599, SEQ ID NO: 1663, SEQ ID NO: 1677, or SEQ ID NO: 1626.

[0013] In another aspect, the invention provides a gRNA molecule that includes a targeting domain that is complementary with a target sequence of a hereditary persistence of fetal hemoglobin (HPFH) region. In an embodiment, the HPFH region is the French HPFH region. In embodiments, the targeting domain includes, e.g., consists of, any one of SEQ ID NO: 86 to SEQ ID NO: 181 or SEQ ID NO: 1500 to SEQ ID NO: 1595. In embodiments, the targeting domain includes, e.g., consists of, any one of SEQ ID NO: 100, SEQ ID NO: 165, SEQ ID NO: 113, SEQ ID NO: 99, SEQ ID NO: 112, SEQ ID NO: 98, SEQ ID NO: 1580, SEQ ID NO: 106, SEQ ID NO: 1503, SEQ ID NO: 1589, SEQ ID NO: 160, SEQ ID NO: 1537, SEQ ID NO: 159, SEQ ID NO: 101, SEQ ID NO: 162, SEQ ID NO: 104, SEQ ID NO: 138, SEQ ID NO: 1536, SEQ ID NO: 1539, SEQ ID NO: 1585. In embodiments, the targeting domain includes, e.g., consists of, SEQ ID NO: 100. In embodiments, the targeting domain includes, e.g., consists of, SEQ ID NO: 165. In embodiments, the targeting domain includes, e.g., consists of, SEQ ID NO: 113.

[0014] In any of the aforementioned embodiments, the gRNA molecule may further have regions and/or properties described herein. In an aspect, the gRNA molecule (e.g., of any of the aforementioned aspects or embodiments) includes a targeting domain that includes, e.g., consists of, 17, 18, 19, 20, 21, 22, 23, or 24 consecutive nucleic acids of any one of the recited targeting domain sequences. In embodiments, the 17, 18, 19, 20, 21, 22, 23, or 24 consecutive nucleic acids of any one of the recited targeting domain sequences are the 17, 18, 19, 20, 21, 22, 23, or 24 consecutive nucleic acids disposed at the 3′ end of the recited targeting domain sequence. In embodiments, the 17, 18, 19, 20, 21, 22, 23, or 24 consecutive nucleic acids of any one of the recited targeting domain sequences are the 17, 18, 19, 20, 21, 22, 23, or 24 consecutive nucleic acids disposed at the 5′ end of the recited targeting domain sequence. In embodiments, the 17, 18, 19, 20, 21, 22, 23, or 24 consecutive nucleic acids of any one of the recited targeting domain sequences do not include either the 5′ or 3′ nucleic acid of the recited targeting domain sequence. In any of the aforementioned aspects or embodiments, the targeting domain may consist of the recited targeting domain sequence.

[0015] In embodiments of the gRNA molecule, including in any of the aforementioned aspects and embodiments, the targeting domain includes 17, 18, 19, 20, 21 (if present in the reference sequence), 22 (if present in the reference sequence), 23 (if present in the reference sequence), 24 (if present in the reference sequence), or 25 (if present in the reference sequence) consecutive nucleic acids of any one of the recited targeting domain sequences. In other embodiments of the gRNA molecule, including in any of the aforementioned aspects and embodiments, the targeting domain consists of 17, 18, 19, 20, 21 (if present in the reference sequence), 22 (if present in the reference sequence), 23 (if present in the reference sequence), or 24 (if present in the reference sequence), or 25 (if present in the reference sequence) consecutive nucleic acids of any one of the recited targeting domain sequences. In embodiments of the gRNA molecule, including in any of the aforementioned aspects and embodiments, the 17, 18, 19, 20, 21 (if present in the reference sequence), 22 (if present in the reference sequence), 23 (if present in the reference sequence), or 24 (if present in the reference sequence), or 25 (if present in the reference sequence) consecutive nucleic acids of any one of the recited targeting domain sequences are the 17, 18, 19, 20, 21 (if present in the reference sequence), 22 (if present in the reference sequence), 23 (if present in the reference sequence), or 24 (if present in the reference sequence), or 25 (if present in the reference sequence) consecutive nucleic acids disposed at the 3′ end of the recited targeting domain sequence. In other embodiments of the gRNA molecule, including in any of the aforementioned aspects and embodiments, the 17, 18, 19, 20, 21 (if present in the reference sequence), 22 (if present in the reference sequence), 23 (if present in the reference sequence), or 24 (if present in the reference sequence), or 25 (if present in the reference sequence) consecutive nucleic acids of any one of the recited targeting domain sequences are the 17, 18, 19, 20, 21 (if present in the reference sequence), 22 (if present in the reference sequence), 23 (if present in the reference sequence), or 24 (if present in the reference sequence), or 25 (if present in the reference sequence) consecutive nucleic acids disposed at the 5′ end of the recited targeting domain sequence. In other embodiments of the gRNA molecule, including in any of the aforementioned aspects and embodiments, the 17, 18, 19, 20, 21 (if present in the reference sequence), 22 (if present in the reference sequence), 23 (if present in the reference sequence), or 24 (if present in the reference sequence), or 25 (if present in the reference sequence) consecutive nucleic acids of any one of the recited targeting domain sequences do not include either the 5′ or 3′ nucleic acid of the recited targeting domain sequence.

[0016] In an aspect, including in any of the aforementioned aspects or embodiments, the gRNA molecule includes a portion of the crRNA and a portion of the tracr that hybridize to form a flagpole, that includes SEQ ID NO: 6584 or 6585. In embodiments, the flagpole further includes a first flagpole extension, located 3′ to the crRNA portion of the flagpole, wherein said first flagpole extension includes SEQ ID NO: 6586. In embodiments, the flagpole further includes a second flagpole extension located 3′ to the crRNA portion of the flagpole and, if present, the first flagpole extension, wherein said second flagpole extension includes SEQ ID NO: 6587.

[0017] In an aspect, including in any of the aforementioned aspects or embodiments, the invention provides a gRNA molecule that includes a tracr that includes, e.g., consists of, SEQ ID NO: 6660 or SEQ ID NO: 6661. In embodiments, the crRNA portion of the flagpole includes SEQ ID NO: 6607 or SEQ ID NO: 6608.

[0018] In an aspect, including in any of the aforementioned aspects or embodiments, the invention provides a gRNA molecule that includes a tracr that includes SEQ ID NO: 6589 or 6590, and optionally, if a first flagpole extension is present, a first tracr extension, disposed 5′ to SEQ ID NO: 6589 or 6590, said first tracr extension including SEQ ID NO: 6591.

[0019] In an aspect, including in any of the aforementioned aspects or embodiments, the invention provides a gRNA molecule wherein the targeting domain and the tracr are disposed on separate nucleic acid molecules (e.g., a dgRNA molecule).

[0020] In an aspect, including in any of the aforementioned aspects or embodiments, the invention provides a gRNA molecule wherein the targeting domain and the tracr are disposed on a single nucleic acid molecule (e.g., a sgRNA molecule), and wherein the tracr is disposed 3′ to the targeting domain. In embodiments, the sgRNA molecule includes a loop, disposed 3′ to the targeting domain and 5′ to the tracr, e.g., a loop including, e.g., consisting of, SEQ ID NO: 6588.

[0021] In an aspect, including in any of the aforementioned aspects or embodiments, the invention provides a gRNA molecule including, from 5′ to 3′, [targeting domain]-:

### (a) SEQ ID NO: 6601;

### (b) SEQ ID NO: 6602;

### (c) SEQ ID NO: 6603;

### (d) SEQ ID NO: 6604; or

[0022] (e) any of (a) to (d), above, further including, at the 3′ end, 1, 2, 3, 4, 5, 6 or 7 uracil (U) nucleotides, e.g., 4 uracil nucleotides. In embodiments, there are no intervening nucleotides between the targeting domain and the sequence of any of (a)-(e).

[0023] In another aspect, the invention provides CRISPR systems, e.g., Cas CRISPR systems, e.g., Cas9 CRISPR systems, e.g., S. pyogenes Cas9 CRISPR systems, the include one or more, e.g., one, gRNA molecule of any of the aforementioned aspects and embodiments. In an aspect, the invention provides a composition including a first gRNA molecule of any of the aforementioned aspects and embodiments, further including a Cas9 molecule. In embodiments, the Cas9 molecule is an active or inactive s. pyogenes Cas9. In embodiments, the first gRNA molecule and Cas9 molecule are present in a ribonuclear protein complex (RNP).

[0024] In another aspect, the invention provides compositions that include more than one gRNA, e.g., more than one gRNA molecule as described herein, e.g., more than one gRNA molecule of any of the aforementioned gRNA molecule aspects or embodiments. Thus, in a further aspect, the invention provides a composition of any of the aforementioned composition aspects and embodiments, further including a second gRNA molecule; a second gRNA molecule and a third gRNA molecule; or a second gRNA molecule, a third gRNA molecule, and a fourth gRNA molecule, wherein the second gRNA molecule, the third gRNA molecule (if present), and the fourth gRNA molecule (if present) are a gRNA molecule as described herein, e.g., a gRNA molecule of any of the aforementioned gRNA molecule aspects or embodiments. In an embodiment, each gRNA molecule of the composition is complementary to a different target sequence. In an embodiment, each gRNA molecule is complementary to target sequences within the same gene or region. In an aspect, the first gRNA molecule, the second gRNA molecule, the third gRNA molecule (if present), and the fourth gRNA molecule (if present) are complementary to target sequences not more than 20000 nucleotides, not more than 10000 nucleotides, not more than 6000, not more than 5000 nucleotides, not more than 4000, not more than 1000 nucleotides, not more than 500 nucleotides, not more than 400 nucleotides, not more than 300 nucleotides, not more than 200 nucleotides, not more than 100 nucleotides, not more than 90 nucleotides, not more than 80 nucleotides, not more than 70 nucleotides, not more than 60 nucleotides, not more than 50 nucleotides, not more than 40 nucleotides, not more than 30 nucleotides, not more than 20 nucleotides or not more than 10 nucleotides apart. In another aspect, each gRNA molecule of the composition is complementary to target sequence within a different gene or region.

[0025] Specific and preferred combinations of more than one gRNA molecule of the invention are described herein. In an aspect, the composition includes a first gRNA molecule and a second gRNA molecule, wherein the first gRNA molecule and second gRNA molecule are complementary to different target sequences, and are:

(a) independently selected from the gRNA molecules described herein (e.g., above) to the BCL11a gene;
(b) independently selected from the gRNA molecules described herein (e.g., above) to the +58 BCL11a enhancer;
(c) independently selected from the gRNA molecules described herein (e.g., above) to the +62 BCL11a enhancer;
(d) independently selected from the gRNA molecules described herein (e.g., above) to the +55 BCL11a enhancer; or
(e) independently selected from the gRNA molecules described herein (e.g., above) to a HPFH region.

[0026] In an aspect, the composition includes a first gRNA molecule and a second gRNA molecule, wherein the first gRNA molecule and second gRNA molecule are complementary to different target sequences, and:

(a) the first gRNA molecule is selected from the gRNA molecules described herein (e.g., above) to the BCL11a gene, and the second gRNA molecule is selected from the gRNA molecules described herein (e.g., above) to the +58 BCL11a enhancer;
(b) the first gRNA molecule is selected from the gRNA molecules described herein (e.g., above) to the BCL11a gene, and the second gRNA molecule is selected from the gRNA molecules described herein (e.g., above) to the +62 BCL11a enhancer;
(c) the first gRNA molecule is selected from the gRNA molecules described herein (e.g., above) to the BCL11a gene, and the second gRNA molecule is selected from the gRNA molecules described herein (e.g., above) to the +55 BCL11a enhancer;
(d) the first gRNA molecule is selected from the gRNA molecules described herein (e.g., above) to the BCL11a gene, and the second gRNA molecule is selected from the gRNA molecules described herein (e.g., above) to a HPFH region;
(e) the first gRNA molecule is selected from the gRNA molecules described herein (e.g., above) to the +58 BCL11a enhancer, and the second gRNA molecule is selected from the gRNA molecules described herein (e.g., above) to the +62 BCL11a enhancer;
(f) the first gRNA molecule is selected from the gRNA molecules described herein (e.g., above) to the +58 BCL11a enhancer, and the second gRNA molecule is selected from the gRNA molecules described herein (e.g., above) to the +55 BCL11a enhancer;
(g) the first gRNA molecule is selected from the gRNA molecules described herein (e.g., above) to the +58 BCL11a enhancer, and the second gRNA molecule is selected from the gRNA molecules described herein (e.g., above) to a HPFH region;
(h) the first gRNA molecule is selected from the gRNA molecules described herein (e.g., above) to the +62 BCL11a enhancer, and the second gRNA molecule is selected from the gRNA molecules described herein (e.g., above) to the +55 BCL11a enhancer;
(i) the first gRNA molecule is selected from the gRNA molecules described herein (e.g., above) to the +62 BCL11a enhancer, and the second gRNA molecule is selected from the gRNA molecules described herein (e.g., above) to a HPFH region;
(j) the first gRNA molecule is selected from the gRNA molecules described herein (e.g., above) to the +55 BCL11a enhancer, and the second gRNA molecule is selected from the gRNA molecules described herein (e.g., above) to a HPFH region;

[0027] In another aspect, the composition that includes a first gRNA molecule and a second gRNA molecule, includes:

(a) a first gRNA molecule that is selected from the gRNA molecules described herein (e.g., above) to a HPFH region, and a second gRNA molecule includes a targeting domain that is complementary to a target sequence of the beta globin gene; or
(b) a first gRNA molecule that is selected from the gRNA molecules described herein (e.g., above) to a BCL11a enhancer, e.g., a +58 BCL11a enhancer, a +55 BCL11a enhancer or a +62 BCL11a enhancer, and a second gRNA molecule includes a targeting domain that is complementary to a target sequence of the beta globin gene.

[0028] In any of the aforementioned composition aspects and embodiments, the composition may consist of, with respect to the gRNA components of the composition, a first gRNA molecule and a second gRNA molecule.

[0029] In any of the aforementioned composition aspects and embodiments, the compositions may be formulated in a medium suitable for electroporation.

[0030] In another aspect, the invention provides nucleic acids encoding the gRNA molecule(s) and/or Cas molecules of the CRISPR systems. Without being bound by theory, it is believed that delivering such nucleic acids to cells will lead to the expression of the CRISPR system within the cell. In an aspect, the invention provides a nucleic acid sequence that encodes one or more gRNA molecules of any of the previous gRNA aspects and embodiments. In embodiments, the nucleic acid includes a promoter operably linked to the sequence that encodes the one or more gRNA molecules. In embodiments, the promoter is a promoter recognized by an RNA polymerase II or RNA polymerase III. In embodiments, the promoter is a U6 promoter or an HI promoter.

[0031] In further aspects, the nucleic acid further comprises sequence encoding a Cas9 molecule. In embodiments, the nucleic acid includes a promoter operably linked to the sequence that encodes a Cas9 molecule. In embodiments, the promoter is an EF-1 promoter, a CMV IE gene promoter, an EF-1α promoter, an ubiquitin C promoter, or a phosphoglycerate kinase (PGK) promoter.

[0032] In an aspect the invention provides a vector that includes the nucleic acid of any of the previous nucleic acid aspects and embodiments. In embodiments, the vector is selected from the group consisting of a lentiviral vector, an adenoviral vector, an adeno-associated viral (AAV) vector, a herpes simplex virus (HSV) vector, a plasmid, a minicircle, a nanoplasmid, and an RNA vector.

[0033] In another aspect, the invention provides a composition including one or more gRNA molecules, e.g., as described herein, e.g., in any of the previous gRNA molecule aspects and embodiments, and nucleic acid encoding a Cas9 molecule.

[0034] In another aspect, the invention provides a composition including nucleic acid encoding one or more gRNA molecules (e.g., as described herein, e.g., of any of the previous gRNA molecule aspects and embodiments), and a Cas9 molecule.

[0035] In another aspect, the invention provides a composition, e.g., a composition of any of the aforementioned composition aspects and embodiments, further including a template nucleic acid. In another aspect, the invention provides a composition, e.g., a composition of any of the aforementioned composition aspects and embodiments, further including nucleic acid sequence encoding a template nucleic acid. In embodiments, the template nucleic acid includes a nucleotide that corresponds to a nucleotide of a target sequence of the gRNA molecule. In embodiments, the template nucleic acid includes nucleic acid encoding human beta globin, e.g., human beta globin including one or more of the mutations G16D, E22A and T87Q. In embodiments, the template nucleic acid includes nucleic acid encoding human gamma globin.

[0036] In another aspect, the invention provides cells that include (or at any time included) a gRNA molecule, CRISPR system, composition or nucleic acid (e.g., as described herein, e.g., as in any of the aforementioned aspects and embodiments). In such aspects, the invention provides cells that have been modified by such inclusion.

[0037] Thus, in an aspect, the invention provides a method of altering e.g., altering the structure, e.g., sequence, of a target sequence within nucleic acid of a cell, including contacting said cell with:

1) one or more gRNA molecules of any of the aforementioned gRNA molecule aspects and embodiments, and a Cas9 molecule (e.g., as described herein);
2) one or more gRNA molecules of any of the aforementioned gRNA molecule aspects and embodiments, and nucleic acid encoding a Cas9 molecule (e.g., as described herein);
3) nucleic acid encoding one or more gRNA molecules of any of the aforementioned gRNA molecule aspects and embodiments, and a Cas9 molecule (e.g., as described herein);
4) nucleic acid encoding one or more gRNA molecules of the aforementioned gRNA molecule aspects and embodiments, and nucleic acid encoding a Cas9 molecule (e.g., as described herein); or
5) any of 1) to 4), above, and a template nucleic acid (e.g., as described herein);
6) any of 1) to 4) above, and nucleic acid including sequence encoding a template nucleic acid (e.g., as described herein);
7) a composition as described herein (e.g., of any of the aforementioned composition aspects and embodiments); or
8) the vector of any of the aforementioned vector aspects and embodiments.

[0038] In embodiments, the gRNA molecule or nucleic acid encoding the gRNA molecule, and the Cas9 molecule or nucleic acid encoding the Cas9 molecule, are formulated in a single composition. In other embodiments, the gRNA molecule or nucleic acid encoding the gRNA molecule, and the Cas9 molecule or nucleic acid encoding the Cas9 molecule, are formulated in more than one composition. In embodiments, the more than one composition are delivered simultaneously or sequentially.

[0039] In embodiments, the cell is an animal cell. In embodiments, the cell the cell is a mammalian, primate, or human cell. In embodiments, the cell is a hempatopoietic stem or progenitor cell (HSPC) (e.g., a population of HSPCs). In embodiments, the cell is a CD34+ cell. In embodiments, the cell is a CD34+/CD38−/CD90+/CD45RA− cell. In embodiments, the cell is a CD34+/CD90+/CD49f+ cell. In embodiments, the cell is a CD34+/CD38−/CD90+/CD45RA−/CD49f+ cell. In embodiments, the method includes a population of cells that has been enriched for HSPCs, e.g., for CD34+ cells.

[0040] In embodiments, the cell (e.g. population of cells) has been isolated from bone marrow. In embodiments, the cell (e.g. population of cells) has been isolated from mobilized peripheral blood. In embodiments, the cell (e.g. population of cells) has been isolated from umbilical cord blood.

[0041] In embodiments, the cell (e.g. population of cells) is autologous with respect to a patient to be administered said cell (e.g. population of cells). In embodiments, the cell (e.g. population of cells) is allogeneic with respect to a patient to be administered said cell (e.g. population of cells).

[0042] In embodiments, of the methods described herein, the altering results in an increase of fetal hemoglobin expression in the cell. In embodiments, of the methods described herein, the altering results in a reduction of fetal hemoglobin expression in the cell.

[0043] In another aspect, the invention provides a cell, altered by the method of any of the aforementioned method aspects and embodiments. In another aspect, the invention provides a cell, including a first gRNA molecule (e.g., as described herein), or a composition (e.g., as described herein), or a nucleic acid encoding the first gRNA molecule (e.g., as described herein), of any of the previous aspects and embodiments. In embodiments, the cell is an animal cell. In embodiments, the cell the cell is a mammalian, primate, or human cell. In embodiments, the cell is a hematopoietic stem or progenitor cell (HSPC) (e.g., a population of HSPCs). In embodiments, the cell is a CD34+ cell. In embodiments, the cell is a CD34+/CD38−/CD90+/CD45RA− cell. In embodiments, the cell is a CD34+/CD90+/CD49f+ cell. In embodiments, the method includes a population of cells that has been enriched for HSPCs, e.g., for CD34+ cells.

[0044] In embodiments, the cell (e.g. population of cells) has been isolated from bone marrow. In embodiments, the cell (e.g. population of cells) has been isolated from mobilized peripheral blood. In embodiments, the cell (e.g. population of cells) has been isolated from umbilical cord blood.

[0045] In embodiments, the cell (e.g. population of cells) is autologous with respect to a patient to be administered said cell (e.g. population of cells). In embodiments, the cell (e.g. population of cells) is allogeneic with respect to a patient to be administered said cell (e.g. population of cells).

[0046] In embodiments, the cell includes, has included, or will include a second gRNA molecule, e.g., as described herein, e.g., of any of the previous gRNA molecule aspects and embodiments, or a nucleic acid encoding the second gRNA molecule, wherein the first gRNA molecule and second gRNA molecule include nonidentical targeting domains.

[0047] In embodiments, expression of fetal hemoglobin is increased in the cell, e.g., relative to a cell of the same cell type that has not been modified to include a gRNA molecule (e.g., as described herein). In embodiments, expression of beta globin is decreased in the cell, e.g., relative to a cell of the same cell type that has not been modified to include a gRNA molecule (e.g., as described herein). In embodiments, expression of fetal hemoglobin is increased and expression of beta globin is decreased in the cell, e.g., relative to a cell of the same cell type that has not been modified to include a gRNA molecule (e.g., as described herein).

[0048] In an aspect, the cells of the invention (or methods comprising a cell) have been contacted with a stem cell expander, e.g., as described herein, e.g., compound 1, compound 2, compound 3 or compound 4. In an aspect, the cells of the invention (or methods comprising a cell) have been contacted with a stem cell expander, e.g., as described herein, e.g., compound 1, compound 2, compound 3, compound 4 or a combination thereof (e.g., compound 1 and compound 4). In an embodiment, the stem cell expander is compound 4. In an embodiment, the stem cell expander is a combination of compound 1 and compound 4. In embodiments, the contacting is ex vivo.

[0049] In another aspect, the invention provides methods of treatment, e.g., methods of treatment of hemoglobinopathies. In an aspect, the invention provides a method of treating a hemoglobinopathy, that includes administering to a patient a cell (e.g., a population of cells) of any of the previous cell or method aspects and embodiments.

[0050] In another aspect, the invention provides a method of increasing fetal hemoglobin expression in a mammal, including administering to a patient a cell of any of the previous cell or method aspects and embodiments. In an embodiment, the hemoglobinopathy is beta-thalassemia or sickle cell disease.

[0051] In another aspect, the invention provides a guide RNA molecule, e.g., as described herein, for use as a medicament, e.g., for use in the treatment of a disease. In embodiments, the disease is a hemoglobinopathy, e.g., beta-thalassemia or sickle cell disease.

[0052] In another aspect, the invention provides a gRNA molecule, e.g., as described herein, e.g., as described in any of the aforementioned gRNA molecule aspects and embodiments, wherein when a CRISPR system including the gRNA is introduced into a cell (e.g., a CD34+ cell, e.g., an HSC), at least about 15% of the indels produced include (a) a frameshift mutation; or (b) a large deletion, relative to unmodified target DNA, as measured by NGS. In embodiments, at least about 25% of the indels produced include (a) a frameshift mutation; or (b) a large deletion, relative to unmodified target DNA, as measured by NGS. In embodiments, at least about 40%, at least about 50%, at least about 60%, at least about 70% at least about 80%, at least about 90%, at least about 95%, at least about 96%, at least about 97%, at least about 98%, or at least about 99% of the indels produced include (a) a frameshift mutation; or (b) a large deletion, relative to unmodified target DNA, as measured by NGS.

[0053] In another aspect, the invention provides methods for the ex vivo expansion and modification of HSPCs (e.g., CD34+ cells). In an aspect, the invention provides a method of modifying cells (e.g., a population of cells) including:

(a) providing a population of cells;
(b) expanding said cells ex vivo in the presence of a stem cell expander; and
(c) introducing into said cells a first gRNA molecule (e.g., as described herein, e.g., of any of the aforementioned gRNA molecule aspects and embodiments), a nucleic acid molecule encoding the first gRNA molecule, or a composition (e.g., as described herein, e.g., of any of the aforementioned composition aspects and embodiments);
such that hemoglobin, e.g., fetal hemoglobin, expression is increased in said cells relative to the same cell type which have not been subjected to step (c).

[0054] In embodiments, the cells are introduced into a subject in need thereof, e.g., a subject that has a hemoglobinopathy, e.g., sickle cell disease or beta thalassemia.

[0055] In embodiments, the cells are or comprise CD34+ cells. In embodiments, the cells are or comprise HSPCs. In embodiments, the cells are isolated from bone marrow, mobilized peripheral blood or umbilical cord blood. In a preferred embodiment, the cells are isolated from bone marrow. In other embodiments, the cells are isolated from mobilized peripheral blood. In aspects, the moblized peripheral blood is isolated from a subject who has been administered a G-CSF. In aspects, the moblized peripheral blood is isolated from a subject who has been administered a moblization agent other than G-CSF, for example, Plerixafor® (AMD3100). In embodiments, the cells are an enriched population of cells.

[0056] In embodiments, the stem cell expander is compound 1, compound 2, compound 3, or compound 4, e.g., compound 4. In embodiments, the stem cell expander is compound 1, compound 2, compound 3, compound 4, or a combination thereof (e.g., a combination of compound 1 and compound 4). In embodiments, the cells are contacted with compound 4 at a concentration of from about 1 to about 200 micromolar (uM). In an embodiment, the concentration of compound 4 is about 75 micromolar (uM). In embodiments, the expanding said cells ex vivo in the presence of a stem cell expander occurs for a period of about 1-10 days, e.g., about 1-5 days, e.g., about 2-5 days, e.g., about 4 days.

[0057] In embodiments, the cells are autologous to a patient intended to be administered said cells. In embodiments, the cells are allogeneic to a patient intended to be administered said cells.

[0058] In embodiments, the expanding of step (b) is further in the presence of thrombopoietin (Tpo), Flt3 ligand (Flt-3L), human stem cell factor (SCF) and human interleukin-6 (IL-6). In embodiments, the thrombopoietin (Tpo), Flt3 ligand (Flt-3L), human stem cell factor (SCF) and human interleukin-6 (IL-6) are each at a concentration of about 50 ng/mL. In embodiments, the thrombopoietin (Tpo), Flt3 ligand (Flt-3L), human stem cell factor (SCF) and human interleukin-6 (IL-6) are each at a concentration of 50 ng/mL.

[0059] Additional aspects and embodiments are described below.

[0060] In an aspect, the invention provides a gRNA molecule that includes a tracr and crRNA, wherein the crRNA includes a targeting domain that is complementary with a target sequence of a BCL11A gene (e.g., a human BCL11a gene), a BCL11a enhancer (e.g., a human BCL11a enhancer), or a HFPH region (e.g., a human HPFH region).

[0061] In embodiments, the target sequence is of the BCL11A gene, and the targeting domain includes, e.g., consists of, any one of SEQ ID NO: 1 to SEQ ID NO: 85 or SEQ ID NO: 400 to SEQ ID NO: 1231. These embodiments are referred to herein as gRNA molecule embodiment 2.

[0062] In other embodiments, the target sequence is of a BCL11a enhancer, and the targeting domain includes, e.g., consists of, any one of SEQ ID NO: 1232 to SEQ ID NO: 1499. These embodiments are referred to herein as gRNA molecule embodiment 3. In preferred embodiments, the target sequence is of a BCL enhancer, and the targeting domain includes, e.g., consists of, any one of SEQ ID NO: 182 to SEQ ID NO: 277 or SEQ ID NO: 334 to SEQ ID NO: 341. These embodiments are referred to herein as gRNA molecule embodiment 4. In more preferred embodiments, the targeting domain includes, e.g., consists of, any one of SEQ ID NO: 341, SEQ ID NO: 246, SEQ ID NO: 248, SEQ ID NO: 247, SEQ ID NO: 245, SEQ ID NO: 249, SEQ ID NO: 244, SEQ ID NO: 199, SEQ ID NO: 251, SEQ ID NO: 250, SEQ ID NO: 334, SEQ ID NO: 185, SEQ ID NO: 186, SEQ ID NO: 336, or SEQ ID NO: 337. These embodiments are referred to herein as gRNA molecule embodiment 5. In still more preferred embodiments, the targeting domain includes, e.g., consists of, any one of SEQ ID NO: 247, SEQ ID NO: 248, SEQ ID NO: 335, SEQ ID NO: 336, SEQ ID NO: 337, or SEQ ID NO: 338 (referred to herein as gRNA molecule embodiment 6), for example, includes, e.g., consists of, any one of SEQ ID NO: 248 or SEQ ID NO: 338 (referred to herein as gRNA molecule embodiment 7). In embodiments, the targeting domain includes, e.g., consists of, SEQ ID NO: 248 (referred to herein as gRNA molecule embodiment 8). In embodiments, the targeting domain includes, e.g., consists of, SEQ ID NO: 338 (referred to herein as gRNA molecule embodiment 9).

[0063] In other embodiments, the target sequence is of a BCL11a enhancer, and the targeting domain includes, e.g., consists of, any one of SEQ ID NO: 278 to SEQ ID NO: 333 (referred to herein as gRNA molecule embodiment 10). In preferred embodiments, the targeting domain includes, e.g., consists of, any one of SEQ ID NO: 318, SEQ ID NO: 312, SEQ ID NO: 313, SEQ ID NO: 294, SEQ ID NO: 310, SEQ ID NO: 319, SEQ ID NO: 298, SEQ ID NO: 322, SEQ ID NO: 311, SEQ ID NO: 315, SEQ ID NO: 290, SEQ ID NO: 317, SEQ ID NO: 309, SEQ ID NO: 289, or SEQ ID NO: 281 (referred to herein as gRNA molecule embodiment 11). In one preferred embodiment, the targeting domain includes, e.g., consists of, SEQ ID NO: 318 (referred to herein as gRNA molecule embodiment 12).

[0064] In other embodiments, the target sequence is of a BCL11a enhancer, and the targeting domain includes, e.g., consists of, any one of SEQ ID NO: 1596 to SEQ ID NO: 1691 (referred to herein as gRNA molecule embodiment 13). In preferred embodiments, the targeting domain includes, e.g., consists of, any one of SEQ ID NO: 1683, SEQ ID NO: 1638, SEQ ID NO: 1647, SEQ ID NO: 1609, SEQ ID NO: 1621, SEQ ID NO: 1617, SEQ ID NO: 1654, SEQ ID NO: 1631, SEQ ID NO: 1620, SEQ ID NO: 1637, SEQ ID NO: 1612, SEQ ID NO: 1656, SEQ ID NO: 1619, SEQ ID NO: 1675, SEQ ID NO: 1645, SEQ ID NO: 1598, SEQ ID NO: 1599, SEQ ID NO: 1663, SEQ ID NO: 1677, or SEQ ID NO: 1626 (referred to herein as gRNA molecule embodiment 14).

[0065] In other embodiments, the target sequence is of a HFPH region (e.g., a French HPFH region), and the targeting domain includes, e.g., consists of, any one of SEQ ID NO: 86 to SEQ ID NO: 181, SEQ ID NO: 1500 to SEQ ID NO: 1595, or SEQ ID NO: 1692 to SEQ ID NO: 1761 (referred to herein as gRNA molecule embodiment 15). In preferred embodiments, the targeting domain includes, e.g., consists of, any one of SEQ ID NO: 100, SEQ ID NO: 165, SEQ ID NO: 113, SEQ ID NO: 99, SEQ ID NO: 112, SEQ ID NO: 98, SEQ ID NO: 1580, SEQ ID NO: 106, SEQ ID NO: 1503, SEQ ID NO: 1589, SEQ ID NO: 160, SEQ ID NO: 1537, SEQ ID NO: 159, SEQ ID NO: 101, SEQ ID NO: 162, SEQ ID NO: 104, SEQ ID NO: 138, SEQ ID NO: 1536, SEQ ID NO: 1539, SEQ ID NO: 1585 (referred to herein as gRNA molecule embodiment 16). In still more preferred embodiments, the targeting domain includes, e.g., consists of, any one of SEQ ID NO: 98, SEQ ID NO: 100, SEQ ID NO: 1505, SEQ ID NO: 1589, SEQ ID NO: 1700, or SEQ ID NO: 1750 (referred to herein as gRNA molecule embodiment 17). In other preferred embodiments, the targeting domain includes, e.g., consists of, any one of SEQ ID NO: 100, SEQ ID NO: 165, or SEQ ID NO: 113 (referred to herein as gRNA molecule embodiment 18).

[0066] In embodiments, the gRNA molecule includes a targeting domain that includes, e.g., consists of, 17, 18, 19, 20, 21, 22, 23, or 24, preferably 20, consecutive nucleic acids of any targeting domain sequence described herein, for example a targeting domain sequence of Table 1 or Table 2. In embodiments, the 17, 18, 19, 20, 21, 22, 23, or 24, preferably 20, consecutive nucleic acids of any one of targeting domain sequences described herein, for example a targeting domain sequence of Table 1 or Table 2, are the 17, 18, 19, 20, 21, 22, 23, or 24, preferably 20, consecutive nucleic acids disposed at the 3′ end of the recited targeting domain sequence. In other embodiments, the 17, 18, 19, 20, 21, 22, 23, or 24, preferably 20, consecutive nucleic acids of any one of the targeting domain sequences described herein, for example a targeting domain sequence of Table 1 or Table 2, are the 17, 18, 19, 20, 21, 22, 23, or 24, preferably 20, consecutive nucleic acids disposed at the 5′ end of the recited targeting domain sequence. In other embodiments, the 17, 18, 19, 20, 21, 22, 23, or 24, preferably 20, consecutive nucleic acids of any one of the targeting domain sequences described herein, for example a targeting domain sequence of Table 1 or Table 2, do not include either the 5′ or 3′ nucleic acid of the recited targeting domain sequence.

[0067] In embodiments, the gRNA molecule includes a targeting domain that includes, e.g., consists of, 17, 18, 19, or 20, preferably 20, consecutive nucleic acids of any targeting domain sequence described herein, for example a targeting domain sequence of Table 5, Table 6, Table 7, Table 8 or Table 9. In embodiments, the 17, 18, 19, or 20, preferably 20, consecutive nucleic acids of any one of targeting domain sequences described herein, for example a targeting domain sequence of Table 5, Table 6, Table 7, Table 8 or Table 9, are the 17, 18, 19, or 20, preferably 20, consecutive nucleic acids disposed at the 3′ end of the recited targeting domain sequence. In other embodiments, the 17, 18, 19, or 20, preferably 20, consecutive nucleic acids of any one of the targeting domain sequences described herein, for example a targeting domain sequence of Table 5, Table 6, Table 7, Table 8 or Table 9, are the 17, 18, 19, or 20, preferably 20, consecutive nucleic acids disposed at the 5′ end of the recited targeting domain sequence. In other embodiments, the 17, 18, 19, or 20, preferably 20, consecutive nucleic acids of any one of the targeting domain sequences described herein, for example a targeting domain sequence of Table 5, Table 6, Table 7, Table 8 or Table 9, do not include either the 5′ or 3′ nucleic acid of the recited targeting domain sequence.

[0068] The following aspects describe features of the gRNA molecule that may be combined with any of the aforementioned aspects and embodiments. In embodiments, the gRNA molecule, including the gRNA molecule of any of the aforementioned aspects and embodiments, include a portion of the crRNA and a portion of the tracr that hybridize to form a flagpole that includes SEQ ID NO: 6584 or 6585. In embodiments, the flagpole further includes a first flagpole extension, located 3′ to the crRNA portion of the flagpole, wherein said first flagpole extension includes SEQ ID NO: 6586. In embodiments, the flagpole further includes (in addition to or in alternative to the first flagpole extension) a second flagpole extension located 3′ to the crRNA portion of the flagpole and, if present, the first flagpole extension, wherein said second flagpole extension includes SEQ ID NO: 6587.

[0069] In embodiments, including in any of the aforementioned aspects and embodiments, the tracr includes SEQ ID NO: 6660 or SEQ ID NO: 6661. In embodiments, the tracr includes SEQ ID NO: 7812, optionally further including, at the 3′ end, an additional 1, 2, 3, 4, 5, 6, or 7 uracil (U) nucleotides. In embodiments, the crRNA includes, from 5′ to 3′, [targeting domain]-: a) SEQ ID NO: 6584; b) SEQ ID NO: 6585; c) SEQ ID NO: 6605; d) SEQ ID NO: 6606; e) SEQ ID NO: 6607; f) SEQ ID NO: 6608; or g) SEQ ID NO: 7806.

[0070] In embodiments, including in any of the aforementioned aspects and embodiments, the tracr includes, from 5′ to 3′: a) SEQ ID NO: 6589; b) SEQ ID NO: 6590; c) SEQ ID NO: 6609; d) SEQ ID NO: 6610; e) SEQ ID NO: 6660; f) SEQ ID NO: 6661; g) SEQ ID NO: 7812; h) SEQ ID NO: 7807; i) SEQ ID NO: 7808; j) SEQ ID NO: 7809; k) any of a) to j), above, further including, at the 3′ end, at least 1, 2, 3, 4, 5, 6 or 7 uracil (U) nucleotides, e.g., 1, 2, 3, 4, 5, 6, or 7 uracil (U) nucleotides; 1) any of a) to k), above, further including, at the 3′ end, at least 1, 2, 3, 4, 5, 6 or 7 adenine (A) nucleotides, e.g., 1, 2, 3, 4, 5, 6, or 7 adenine (A) nucleotides; or m) any of a) to l), above, further including, at the 5′ end (e.g., at the 5′ terminus), at least 1, 2, 3, 4, 5, 6 or 7 adenine (A) nucleotides, e.g., 1, 2, 3, 4, 5, 6, or 7 adenine (A) nucleotides.

[0071] In embodiments, the targeting domain and the tracr are disposed on separate nucleic acids molecules. In embodiments of such gRNA molecules, the nucleic acid molecule including the targeting domain includes SEQ ID NO: 6607, optionally disposed immediately 3′ to the targeting domain, and the nucleic acid molecule including the tracr includes, e.g., consists of, SEQ ID NO: 6660.

[0072] In embodiments, the crRNA portion of the flagpole includes SEQ ID NO: 6607 or SEQ ID NO: 6608.

[0073] In embodiments, the tracr includes SEQ ID NO: 6589 or 6590, and optionally, if a first flagpole extension is present, a first tracr extension, disposed 5′ to SEQ ID NO: 6589 or 6590, said first tracr extension including SEQ ID NO: 6591.

[0074] In embodiments, including in embodiments of any of the aforementioned aspects and embodiments, the targeting domain and the tracr are disposed on separate nucleic acid molecules. In other embodiments, including in embodiments of any of the aforementioned aspects and embodiments, the targeting domain and the tracr are disposed on a single nucleic acid molecule, for example, the tracr is disposed 3′ to the targeting domain.

[0075] In embodiments, when the targeting domain and the tracr are disposed on a single nucleic acid molecule, the gRNA molecule further includes a loop, disposed 3′ to the targeting domain and 5′ to the tracr. In embodiments, the loop includes, e.g., consists of, SEQ ID NO: 6588.

[0076] In embodiments, when the targeting domain and the tracr are disposed on a single nucleic acid molecule, the gRNA molecule includes, from 5′ to 3′, [targeting domain]-: (a) SEQ ID NO: 6601; (b) SEQ ID NO: 6602; (c) SEQ ID NO: 6603; (d) SEQ ID NO: 6604; (e) SEQ ID NO: 7811; or (f) any of (a) to (e), above, further including, at the 3′ end, 1, 2, 3, 4, 5, 6 or 7 uracil (U) nucleotides. In embodiments, the gRNA molecule includes, e.g., consists of, said targeting domain and SEQ ID NO: 7811, optionally disposed immediately 3′ to said targeting domain.

[0077] In embodiments, including in any of the aforementioned aspects and embodiments, each of the nucleic acid residues of the gRNA molecule is an unmodified A, U, G or C nucleic acid residue and unmodified phosphate bonds between each residue of the nucleic acid molecule(s). In other embodiments, including in any of the aforementioned aspects and embodiments, one, or optionally more than one, of the nucleic acid molecules that make up the gRNA molecule includes: a) one or more, e.g., three, phosphorothioate modifications at the 3′ end of said nucleic acid molecule or molecules; b) one or more, e.g., three, phosphorothioate modifications at the 5′ end of said nucleic acid molecule or molecules; c) one or more, e.g., three, 2′-O-methyl modifications at the 3′ end of said nucleic acid molecule or molecules; d) one or more, e.g., three, 2′-O-methyl modifications at the 5′ end of said nucleic acid molecule or molecules; e) a 2′ O-methyl modification at each of the 4^{th}-to-terminal, 3^{rd}-to-terminal, and 2^{nd}-to-terminal 3′ residues of said nucleic acid molecule or molecules; f) a 2′ O-methyl modification at each of the 4^{th}-to-terminal, 3^{rd}-to-terminal, and 2^{nd}-to-terminal 5′ residues of said nucleic acid molecule or molecules; or f) any combination thereof.

[0078] In preferred embodiments, the invention provides a gRNA molecule (e.g., that is a sgRNA molecule) including, e.g., consisting of, the sequence: (a) SEQ ID NO: 342; (b) SEQ ID NO: 343; or (c) SEQ ID NO: 1762 (referred to in this summary of invention as gRNA molecule embodiment 41).

[0079] In other preferred embodiments, the invention provides gRNA molecule (e.g., that is a dual gRNA molecule) including, e.g., consisting of: (a) a crRNA including, e.g., consisting of, SEQ ID NO: 344, and a tracr including, e.g., consisting of, SEQ ID NO: 6660; (b) a crRNA including, e.g., consisting of, SEQ ID NO: 344, and a tracr including, e.g., consisting of, SEQ ID NO: 346; (c) a crRNA including, e.g., consisting of, SEQ ID NO: 345, and a tracr including, e.g., consisting of, SEQ ID NO: 6660; or (d) a crRNA including, e.g., consisting of, SEQ ID NO: 345, and a tracr including, e.g., consisting of, SEQ ID NO: 346 (referred to in this summary of invention as gRNA molecule embodiment 42).

[0080] In other preferred embodiments, the invention provides a gRNA molecule (e.g., that is a sgRNA molecule) including, e.g., consisting of, the sequence: (a) SEQ ID NO: 347; (b) SEQ ID NO: 348; or (c) SEQ ID NO: 1763 (referred to in this summary of invention as gRNA molecule embodiment 43).

[0081] In other preferred embodiments, the invention provides gRNA molecule (e.g., that is a dual gRNA molecule) including, e.g., consisting of: (a) a crRNA including, e.g., consisting of, SEQ ID NO: 349, and a tracr including, e.g., consisting of, SEQ ID NO: 6660; (b) a crRNA including, e.g., consisting of, SEQ ID NO: 349, and a tracr including, e.g., consisting of, SEQ ID NO: 346; (c) a crRNA including, e.g., consisting of, SEQ ID NO: 350, and a tracr including, e.g., consisting of, SEQ ID NO: 6660; or (d) a crRNA including, e.g., consisting of, SEQ ID NO: 350, and a tracr including, e.g., consisting of, SEQ ID NO: 346 (referred to in this summary of invention as gRNA molecule embodiment 44).

[0082] In other preferred embodiments, the invention provides a gRNA molecule (e.g., that is a sgRNA molecule) including, e.g., consisting of, the sequence: (a) SEQ ID NO: 351; (b) SEQ ID NO: 352; or (c) SEQ ID NO: 1764 (referred to in this summary of invention as gRNA molecule embodiment 45).

[0083] In other preferred embodiments, the invention provides gRNA molecule (e.g., that is a dual gRNA molecule) including, e.g., consisting of: (a) a crRNA including, e.g., consisting of, SEQ ID NO: 353, and a tracr including, e.g., consisting of, SEQ ID NO: 6660; (b) a crRNA including, e.g., consisting of, SEQ ID NO: 353, and a tracr including, e.g., consisting of, SEQ ID NO: 346; (c) a crRNA including, e.g., consisting of, SEQ ID NO: 354, and a tracr including, e.g., consisting of, SEQ ID NO: 6660; or (d) a crRNA including, e.g., consisting of, SEQ ID NO: 354, and a tracr including, e.g., consisting of, SEQ ID NO: 346 (referred to in this summary of invention as gRNA molecule embodiment 46).

[0084] In other preferred embodiments, the invention provides a gRNA molecule (e.g., that is a sgRNA molecule) including, e.g., consisting of, the sequence: (a) SEQ ID NO: 355; (b) SEQ ID NO: 356; or (c) SEQ ID NO: 1765 (referred to in this summary of invention as gRNA molecule embodiment 47).

[0085] In other preferred embodiments, the invention provides gRNA molecule (e.g., that is a dual gRNA molecule) including, e.g., consisting of: (a) a crRNA including, e.g., consisting of, SEQ ID NO: 357, and a tracr including, e.g., consisting of, SEQ ID NO: 6660; (b) a crRNA including, e.g., consisting of, SEQ ID NO: 357, and a tracr including, e.g., consisting of, SEQ ID NO: 346; (c) a crRNA including, e.g., consisting of, SEQ ID NO: 358, and a tracr including, e.g., consisting of, SEQ ID NO: 6660; or (d) a crRNA including, e.g., consisting of, SEQ ID NO: 358, and a tracr including, e.g., consisting of, SEQ ID NO: 346 (referred to in this summary of invention as gRNA molecule embodiment 48).

[0086] In other preferred embodiments, the invention provides a gRNA molecule (e.g., that is a sgRNA molecule) including, e.g., consisting of, the sequence: (a) SEQ ID NO: 359; (b) SEQ ID NO: 360; or (c) SEQ ID NO: 1766 (referred to in this summary of invention as gRNA molecule embodiment 49).

[0087] In other preferred embodiments, the invention provides gRNA molecule (e.g., that is a dual gRNA molecule) including, e.g., consisting of: (a) a crRNA including, e.g., consisting of, SEQ ID NO: 361, and a tracr including, e.g., consisting of, SEQ ID NO: 6660; (b) a crRNA including, e.g., consisting of, SEQ ID NO: 361, and a tracr including, e.g., consisting of, SEQ ID NO: 346; (c) a crRNA including, e.g., consisting of, SEQ ID NO: 362, and a tracr including, e.g., consisting of, SEQ ID NO: 6660; or (d) a crRNA including, e.g., consisting of, SEQ ID NO: 362, and a tracr including, e.g., consisting of, SEQ ID NO: 346 (referred to in this summary of invention as gRNA molecule embodiment 50).

[0088] In other preferred embodiments, the invention provides a gRNA molecule (e.g., that is a sgRNA molecule) including, e.g., consisting of, the sequence: (a) SEQ ID NO: 363; (b) SEQ ID NO: 364; or (c) SEQ ID NO: 1767 (referred to in this summary of invention as gRNA molecule embodiment 51).

[0089] In other preferred embodiments, the invention provides gRNA molecule (e.g., that is a dual gRNA molecule) including, e.g., consisting of: (a) a crRNA including, e.g., consisting of, SEQ ID NO: 365, and a tracr including, e.g., consisting of, SEQ ID NO: 6660; (b) a crRNA including, e.g., consisting of, SEQ ID NO: 365, and a tracr including, e.g., consisting of, SEQ ID NO: 346; (c) a crRNA including, e.g., consisting of, SEQ ID NO: 366, and a tracr including, e.g., consisting of, SEQ ID NO: 6660; or (d) a crRNA including, e.g., consisting of, SEQ ID NO: 366, and a tracr including, e.g., consisting of, SEQ ID NO: 346 (referred to in this summary of invention as gRNA molecule embodiment 52).

[0090] In other preferred embodiments, the invention provides a gRNA molecule (e.g., that is a sgRNA molecule) including, e.g., consisting of, the sequence: (a) SEQ ID NO: 367; (b) SEQ ID NO: 368; or (c) SEQ ID NO: 1768 (referred to in this summary of invention as gRNA molecule embodiment 53).

[0091] In other preferred embodiments, the invention provides gRNA molecule (e.g., that is a dual gRNA molecule) including, e.g., consisting of: (a) a crRNA including, e.g., consisting of, SEQ ID NO: 369, and a tracr including, e.g., consisting of, SEQ ID NO: 6660; (b) a crRNA including, e.g., consisting of, SEQ ID NO: 369, and a tracr including, e.g., consisting of, SEQ ID NO: 346; (c) a crRNA including, e.g., consisting of, SEQ ID NO: 370, and a tracr including, e.g., consisting of, SEQ ID NO: 6660; or (d) a crRNA including, e.g., consisting of, SEQ ID NO: 370, and a tracr including, e.g., consisting of, SEQ ID NO: 346 (referred to in this summary of invention as gRNA molecule embodiment 54).

[0092] In other preferred embodiments, the invention provides a gRNA molecule (e.g., that is a sgRNA molecule) including, e.g., consisting of, the sequence: (a) SEQ ID NO: 371; (b) SEQ ID NO: 372; or (c) SEQ ID NO: 1769 (referred to in this summary of invention as gRNA molecule embodiment 55).

[0093] In other preferred embodiments, the invention provides gRNA molecule (e.g., that is a dual gRNA molecule) including, e.g., consisting of: (a) a crRNA including, e.g., consisting of, SEQ ID NO: 373, and a tracr including, e.g., consisting of, SEQ ID NO: 6660; (b) a crRNA including, e.g., consisting of, SEQ ID NO: 373, and a tracr including, e.g., consisting of, SEQ ID NO: 346; (c) a crRNA including, e.g., consisting of, SEQ ID NO: 374, and a tracr including, e.g., consisting of, SEQ ID NO: 6660; or (d) a crRNA including, e.g., consisting of, SEQ ID NO: 374, and a tracr including, e.g., consisting of, SEQ ID NO: 346 (referred to in this summary of invention as gRNA molecule embodiment 56).

[0094] In other preferred embodiments, the invention provides a gRNA molecule (e.g., that is a sgRNA molecule) including, e.g., consisting of, the sequence: (a) SEQ ID NO: 375; (b) SEQ ID NO: 376; or (c) SEQ ID NO: 1770 (referred to in this summary of invention as gRNA molecule embodiment 57).

[0095] In other preferred embodiments, the invention provides gRNA molecule (e.g., that is a dual gRNA molecule) including, e.g., consisting of: (a) a crRNA including, e.g., consisting of, SEQ ID NO: 377, and a tracr including, e.g., consisting of, SEQ ID NO: 6660; (b) a crRNA including, e.g., consisting of, SEQ ID NO: 377, and a tracr including, e.g., consisting of, SEQ ID NO: 346; (c) a crRNA including, e.g., consisting of, SEQ ID NO: 378, and a tracr including, e.g., consisting of, SEQ ID NO: 6660; or (d) a crRNA including, e.g., consisting of, SEQ ID NO: 378, and a tracr including, e.g., consisting of, SEQ ID NO: 346 (referred to in this summary of invention as gRNA molecule embodiment 58).

[0096] In other preferred embodiments, the invention provides a gRNA molecule (e.g., that is a sgRNA molecule) including, e.g., consisting of, the sequence: (a) SEQ ID NO: 379; (b) SEQ ID NO: 380; or (c) SEQ ID NO: 1771 (referred to in this summary of invention as gRNA molecule embodiment 59).

[0097] In other preferred embodiments, the invention provides gRNA molecule (e.g., that is a dual gRNA molecule) including, e.g., consisting of: (a) a crRNA including, e.g., consisting of, SEQ ID NO: 381, and a tracr including, e.g., consisting of, SEQ ID NO: 6660; (b) a crRNA including, e.g., consisting of, SEQ ID NO: 381, and a tracr including, e.g., consisting of, SEQ ID NO: 346; (c) a crRNA including, e.g., consisting of, SEQ ID NO: 382, and a tracr including, e.g., consisting of, SEQ ID NO: 6660; or (d) a crRNA including, e.g., consisting of, SEQ ID NO: 382, and a tracr including, e.g., consisting of, SEQ ID NO: 346 (referred to in this summary of invention as gRNA molecule embodiment 60).

[0098] In other preferred embodiments, the invention provides a gRNA molecule (e.g., that is a sgRNA molecule) including, e.g., consisting of, the sequence: (a) SEQ ID NO: 383; (b) SEQ ID NO: 384; or (c) SEQ ID NO: 1772 (referred to in this summary of invention as gRNA molecule embodiment 61).

[0099] In other preferred embodiments, the invention provides gRNA molecule (e.g., that is a dual gRNA molecule) including, e.g., consisting of: (a) a crRNA including, e.g., consisting of, SEQ ID NO: 385, and a tracr including, e.g., consisting of, SEQ ID NO: 6660; (b) a crRNA including, e.g., consisting of, SEQ ID NO: 385, and a tracr including, e.g., consisting of, SEQ ID NO: 346; (c) a crRNA including, e.g., consisting of, SEQ ID NO: 386, and a tracr including, e.g., consisting of, SEQ ID NO: 6660; or (d) a crRNA including, e.g., consisting of, SEQ ID NO: 386, and a tracr including, e.g., consisting of, SEQ ID NO: 346 (referred to in this summary of invention as gRNA molecule embodiment 62).

[0100] In other preferred embodiments, the invention provides a gRNA molecule (e.g., that is a sgRNA molecule) including, e.g., consisting of, the sequence: (a) SEQ ID NO: 387; (b) SEQ ID NO: 388; or (c) SEQ ID NO: 1773 (referred to in this summary of invention as gRNA molecule embodiment 63).

[0101] In other preferred embodiments, the invention provides gRNA molecule (e.g., that is a dual gRNA molecule) including, e.g., consisting of: (a) a crRNA including, e.g., consisting of, SEQ ID NO: 389, and a tracr including, e.g., consisting of, SEQ ID NO: 6660; (b) a crRNA including, e.g., consisting of, SEQ ID NO: 389, and a tracr including, e.g., consisting of, SEQ ID NO: 346; (c) a crRNA including, e.g., consisting of, SEQ ID NO: 390, and a tracr including, e.g., consisting of, SEQ ID NO: 6660; or (d) a crRNA including, e.g., consisting of, SEQ ID NO: 390, and a tracr including, e.g., consisting of, SEQ ID NO: 346 (referred to in this summary of invention as gRNA molecule embodiment 64).

[0102] In other preferred embodiments, the invention provides a gRNA molecule (e.g., that is a sgRNA molecule) including, e.g., consisting of, the sequence: (a) SEQ ID NO: 391; (b) SEQ ID NO: 392; or (c) SEQ ID NO: 1774 (referred to in this summary of invention as gRNA molecule embodiment 65).

[0103] In other preferred embodiments, the invention provides gRNA molecule (e.g., that is a dual gRNA molecule) including, e.g., consisting of: (a) a crRNA including, e.g., consisting of, SEQ ID NO: 393, and a tracr including, e.g., consisting of, SEQ ID NO: 6660; (b) a crRNA including, e.g., consisting of, SEQ ID NO: 393, and a tracr including, e.g., consisting of, SEQ ID NO: 346; (c) a crRNA including, e.g., consisting of, SEQ ID NO: 394, and a tracr including, e.g., consisting of, SEQ ID NO: 6660; or (d) a crRNA including, e.g., consisting of, SEQ ID NO: 394, and a tracr including, e.g., consisting of, SEQ ID NO: 346 (referred to in this summary of invention as gRNA molecule embodiment 66).

[0104] In other preferred embodiments, the invention provides a gRNA molecule (e.g., that is a sgRNA molecule) including, e.g., consisting of, the sequence: (a) SEQ ID NO: 395; (b) SEQ ID NO: 396; or (c) SEQ ID NO: 1775 (referred to in this summary of invention as gRNA molecule embodiment 67).

[0105] In other preferred embodiments, the invention provides gRNA molecule (e.g., that is a dual gRNA molecule) including, e.g., consisting of: (a) a crRNA including, e.g., consisting of, SEQ ID NO: 397, and a tracr including, e.g., consisting of, SEQ ID NO: 6660; (b) a crRNA including, e.g., consisting of, SEQ ID NO: 397, and a tracr including, e.g., consisting of, SEQ ID NO: 346; (c) a crRNA including, e.g., consisting of, SEQ ID NO: 398, and a tracr including, e.g., consisting of, SEQ ID NO: 6660; or (d) a crRNA including, e.g., consisting of, SEQ ID NO: 398, and a tracr including, e.g., consisting of, SEQ ID NO: 346 (referred to in this summary of invention as gRNA molecule embodiment 68).

[0106] In embodiments, including in any of the aforementioned aspects and embodiments, the invention provides a gRNA molecule, wherein when a CRISPR system (e.g., an RNP as described herein) including the gRNA molecule is introduced into a cell, an indel is formed at or near the target sequence complementary to the targeting domain of the gRNA molecule. In embodiments, including in embodiments comprising a targeting domain complementary to a target sequence of a +58 Enhancer region, the indel does not include a nucleotide of a GATA-1 and/or TAL-1 binding site. In embodiments, the indel does not interfere with the binding of GATA-1 and/or TAL-1 to their binding sites. In embodiments, including in any of the aforementioned aspects and embodiments, the invention provides a gRNA molecule, wherein when a CRISPR system (e.g., an RNP as described herein) including the gRNA molecule is introduced into a population of cells, an indel is formed at or near the target sequence complementary to the targeting domain of the gRNA molecule in at least about 40%, e.g., at least about 50%, e.g., at least about 60%, e.g., at least about 70%, e.g., at least about 80%, e.g., at least about 90%, e.g., at least about 95%, e.g., at least about 96%, e.g., at least about 97%, e.g., at least about 98%, e.g., at least about 99%, of the cells of the population. In embodiments, including in any of the aforementioned aspects and embodiments, the invention provides a gRNA molecule, wherein when a CRISPR system (e.g., an RNP as described herein) including the gRNA molecule is introduced into a population of cells, an indel that does not include a nucleotide of a GATA-1 and/or TAL-1 binding site is formed at or near the target sequence complementary to the targeting domain of the gRNA molecule in at least about 20%, e.g., at least about 30%, e.g., at least about 35%, e.g., at least about 40%, e.g., at least about 45%, e.g., at least about 50%, e.g., at least about 55%, e.g., at least about 60%, e.g., at least about 65%, e.g., at least about 70%, e.g., at least about 75%, e.g., at least about 80%, e.g., at least about 85%, e.g., at least about 90%, e.g., at least about 95%, e.g., at least about 99%, of the cells of the population. In embodiments, including in any of the aforementioned aspects and embodiments, the indel is an indel listed in any of FIG. 25, Table 15, Table 26, Table 27 or Table 37. In embodiments, in at least about 30%, e.g., least about 40%, e.g., at least about 50%, e.g., at least about 60%, e.g., at least about 70%, e.g., at least about 80%, e.g., at least about 90%, e.g., at least about 95%, e.g., at least about 96%, e.g., at least about 97%, e.g., at least about 98%, e.g., at least about 99%, of the cells of the population, the indel is an indel listed in any of FIG. 25, Table 15, Table 26, Table 27 or Table 37. In embodiments, the three most frequently detected indels in said population of cells include the indels associated with any gRNA molecule listed in any of FIG. 25, Table 15, Table 26, Table 27 or Table 37. In embodiments, the indel (or pattern of top indels) is as measured by next generation sequencing (NGS), e.g., as described in the art. In embodiments, including in any of the aforementioned aspects and embodiments, the invention provides a gRNA molecule, wherein when a CRISPR system (e.g., an RNP as described herein) including the gRNA molecule is introduced into a cell, no off-target indels are formed in said cell, e.g., as detectible by next generation sequencing and/or a nucleotide insertional assay, e.g., assayed in an HPCS cell, e.g., a CD34+ cell. In embodiments, including in any of the aforementioned aspects and embodiments, the invention provides a gRNA molecule, wherein when a CRISPR system (e.g., an RNP as described herein) including the gRNA molecule is introduced into a population of cells, no off-target indel is detected in more than about 5%, e.g., more than about 1%, e.g., more than about 0.1%, e.g., more than about 0.01%, of the cells of the population of cells, e.g., as detectible by next generation sequencing and/or a nucleotide insertional assay, e.g., assayed in a population of HPSC cells, e.g., a population of CD34+ cells.

[0107] In embodiments, including in any of the aforementioned aspects and embodiments, the invention provides a gRNA molecule, wherein when a CRISPR system (e.g., an RNP as described herein) including the gRNA molecule is introduced into a cell, expression of fetal hemoglobin is increased in said cell or its progeny, e.g., its erythroid progeny, e.g., its red blood cell progeny. In embodiments, expression of fetal hemoglobin is increased in said cell or its progeny, e.g., its erythroid progeny, e.g., its red blood cell progeny, by at least about 20%, e.g., at least about 30%, e.g., at least about 40%, e.g., at least about 50%, e.g., at least about 60%, e.g., at least about 70%, e.g., at least about 80%, e.g., at least about 90%, e.g., at least about 95%, e.g., at least about 96%, e.g., at least about 97%, e.g., at least about 98%, e.g., at least about 99%. In embodiments, said cell or its progeny, e.g., its erythroid progeny, e.g., its red blood cell progeny, produces at least about 6 picograms (e.g., at least about 7 picograms, at least about 8 picograms, at least about 9 picograms, at least about 10 picograms, or from about 8 to about 9 picograms, or from about 9 to about 10 picograms) fetal hemoglobin per cell. In embodiments, including in any of the aforementioned aspects and embodiments, the invention provides a gRNA molecule, wherein when a CRISPR system (e.g., an RNP as described herein) including the gRNA molecule is introduced into a cell, levels of fetal hemoglobin (e.g., gamma globin) mRNA are increased in said cell or its progeny, e.g., its erythroid progeny, e.g., its red blood cell progeny. In embodiments, including in any of the aforementioned aspects and embodiments, the invention provides a gRNA molecule, wherein when a CRISPR system (e.g., an RNP as described herein) including the gRNA molecule is introduced into a cell, expression of BCL11a mRNA is decreased in said cell or its progeny, e.g., its erythroid progeny, e.g., its red blood cell progeny. In embodiments, including in any of the aforementioned aspects and embodiments, the invention provides a gRNA molecule, wherein when a CRISPR system (e.g., an RNP as described herein) including the gRNA molecule is introduced into a cell, levels of BCL11a mRNA are decreased in said cell or its progeny, e.g., its erythroid progeny, e.g., its red blood cell progeny.

[0108] In any of the aforementioned aspects and embodiments that mention a cell, the cell is (or population of cells includes) a mammalian, primate, or human cell, e.g., is a human cell or population of human cells. In embodiments, the cell is (or population of cells includes) an HSPC, for example, is CD34+, for example, is CD34+CD90+. In embodiments, the cell (or population of cells) is autologous with respect to a patient to be administered said cell. In other embodiments, the cell (or population of cells) is allogeneic with respect to a patient to be administered said cell.

[0109] In another aspect, the invention provides a composition including: 1) one or more gRNA molecules (including a first gRNA molecule) described herein, for example, one or more gRNA molecules of any of the previous aspects and embodiments, and a Cas9 molecule, for example, as described herein; 2) one or more gRNA molecules (including a first gRNA molecule) described herein, for example, one or more gRNA molecules of any of the previous aspects and embodiments, and nucleic acid encoding a Cas9 molecule (described herein); 3) nucleic acid encoding one or more gRNA molecules (including a first gRNA molecule) described herein, for example, one or more gRNA molecules of any of the previous aspects and embodiments, and a Cas9 molecule (described herein); 4) nucleic acid encoding one or more gRNA molecules (including a first gRNA molecule) described herein, for example, one or more gRNA molecules of any of the previous aspects and embodiments, and nucleic acid encoding a Cas9 molecule (described herein); or 5) any of 1) to 4), above, and a template nucleic acid; or 6) any of 1) to 4) above, and nucleic acid including sequence encoding a template nucleic acid.

[0110] In preferred embodiments, the invention provides a composition including a first gRNA molecule (e.g., described herein, e.g., a first gRNA molecule of any of the previous gRNA molecule aspects and embodiments), further including a Cas9 molecule (described herein).

[0111] In embodiments, the Cas9 molecule is an active or inactive s. pyogenes Cas9. In embodiments, the Cas9 molecule includes SEQ ID NO: 6611. In embodiments, the Cas9 molecule includes, e.g., consists of: (a) SEQ ID NO: 7821; (b) SEQ ID NO: 7822; (c) SEQ ID NO: 7823; (d) SEQ ID NO: 7824; (e) SEQ ID NO: 7825; (f) SEQ ID NO: 7826; (g) SEQ ID NO: 7827; (h) SEQ ID NO: 7828; (i) SEQ ID NO: 7829; (j) SEQ ID NO: 7830; or (k) SEQ ID NO: 7831.

[0112] In preferred embodiments, the first gRNA molecule and Cas9 molecule are present in a ribonuclear protein complex (RNP).

[0113] In embodiments, the invention provides a composition, e.g., a composition of any of the previous aspects and embodiments, further including a second gRNA molecule; a second gRNA molecule and a third gRNA molecule; or a second gRNA molecule, optionally, a third gRNA molecule, and, optionally, a fourth gRNA molecule, wherein the second gRNA molecule, the optional third gRNA molecule, and the optional fourth gRNA molecule are a gRNA molecule of a gRNA molecule described herein, e.g., a gRNA molecule of any of the previous gRNA molecule aspects and embodiments, and wherein each gRNA molecule of the composition is complementary to a different target sequence.

[0114] In embodiments, two or more of the first gRNA molecule, the second gRNA molecule, the optional third gRNA molecule, and the optional fourth gRNA molecule are complementary to target sequences within the same gene or region. In embodiments, the first gRNA molecule, the second gRNA molecule, the optional third gRNA molecule, and the optional fourth gRNA molecule are complementary to target sequences not more than 20000 nucleotides, not more than 10000 nucleotides, not more than 6000, not more than 5000 nucleotides, not more than 4000, not more than 1000 nucleotides, not more than 500 nucleotides, not more than 400 nucleotides, not more than 300 nucleotides, not more than 200 nucleotides, not more than 100 nucleotides, not more than 90 nucleotides, not more than 80 nucleotides, not more than 70 nucleotides, not more than 60 nucleotides, not more than 50 nucleotides, not more than 40 nucleotides, not more than 30 nucleotides, not more than 20 nucleotides or not more than 10 nucleotides apart.

[0115] In other embodiments, two or more of the first gRNA molecule, the second gRNA molecule, the optional third gRNA molecule, and the optional fourth gRNA molecule are complementary to target sequence within different genes or regions.

[0116] In embodiments, including in any of the aforementioned composition aspects and embodiments, the invention provides a composition including a first gRNA molecule and a second gRNA molecule, wherein the first gRNA molecule and second gRNA molecule are:

(a) independently selected from the gRNA molecules of gRNA molecule embodiment 4, and are complementary to different target sequences;
(b) independently selected from the gRNA molecules of gRNA molecule embodiment 5, and are complementary to different target sequences;
c) independently selected from the gRNA molecules of gRNA molecule embodiment 6, and are complementary to different target sequences; or
(d) independently selected from the gRNA molecules of gRNA molecule embodiment 7, and are complementary to different target sequences; or
(e) independently selected from the gRNA molecules of any of gRNA molecule embodiments 41-56, and are complementary to different target sequences.

[0117] In embodiments, including in any of the aforementioned composition aspects and embodiments, the invention provides a composition including a first gRNA molecule and a second gRNA molecule, wherein the first gRNA molecule and second gRNA molecule are:

(a) independently selected from the gRNA molecules of gRNA molecule embodiment 10, and are complementary to different target sequences; or
(b) independently selected from the gRNA molecules of gRNA molecule embodiment 11, and are complementary to different target sequences.

[0118] In embodiments, including in any of the aforementioned composition aspects and embodiments, the invention provides a composition, including a first gRNA molecule and a second gRNA molecule, wherein the first gRNA molecule and second gRNA molecule are:

(a) independently selected from the gRNA molecules of gRNA molecule embodiment 13, and are complementary to different target sequences; or
(b) independently selected from the gRNA molecules of gRNA molecule embodiment 14, and are complementary to different target sequences.

[0119] In embodiments, including in any of the aforementioned composition aspects and embodiments, the invention provides a composition, including a first gRNA molecule and a second gRNA molecule, wherein the first gRNA molecule and second gRNA molecule are:

(a) independently selected from the gRNA molecules of gRNA molecule embodiment 16, and are complementary to different target sequences;
(b) independently selected from the gRNA molecules of gRNA molecule embodiment 17, and are complementary to different target sequences;
(c) independently selected from the gRNA molecules of gRNA molecule embodiment 18, and are complementary to different target sequences; or
(d) independently selected from the gRNA molecules of any of gRNA molecule embodiments 57-68, and are complementary to different target sequences.

[0120] In embodiments, including in any of the aforementioned composition aspects and embodiments, the invention provides a composition, including a first gRNA molecule and a second gRNA molecule, wherein:

(1) the first gRNA molecule is: (a) selected from the gRNA molecules of gRNA molecule embodiment 4, (b) selected from the gRNA molecules of gRNA molecule embodiment 5, (c) selected from the gRNA molecules of gRNA molecule embodiment 6, (d) selected from the gRNA molecules of gRNA molecule embodiment 7, or (e) selected from the gRNA molecules of any of gRNA molecule embodiments 41-56; and
(2) the second gRNA molecule is: (a) selected from the gRNA molecules of gRNA molecule embodiment 10, or (b) selected from the gRNA molecules of gRNA molecule embodiment 11.

[0121] In embodiments, including in any of the aforementioned composition aspects and embodiments, the invention provides a composition, including a first gRNA molecule and a second gRNA molecule, wherein:

(1) the first gRNA molecule is: (a) selected from the gRNA molecules of gRNA molecule embodiment 4, (b) selected from the gRNA molecules of gRNA molecule embodiment 5, (c) selected from the gRNA molecules of gRNA molecule embodiment 6, (d) selected from the gRNA molecules of gRNA molecule embodiment 7, or (e) selected from the gRNA molecules of any of gRNA molecule embodiments 41-56; and
(2) the second gRNA molecule is: (a) selected from the gRNA molecules of gRNA molecule embodiment 13, (b) selected from the gRNA molecules of gRNA molecule embodiment 14.

[0122] In embodiments, including in any of the aforementioned composition aspects and embodiments, the invention provides a composition, including a first gRNA molecule and a second gRNA molecule, wherein:

(1) the first gRNA molecule is: (a) selected from the gRNA molecules of gRNA molecule embodiment 4, (b) selected from the gRNA molecules of gRNA molecule embodiment 5, (c) selected from the gRNA molecules of gRNA molecule embodiment 6, (d) selected from the gRNA molecules of gRNA molecule embodiment 7, or (e) selected from the gRNA molecules of any of gRNA molecule embodiments 41-56; and
(2) the second gRNA molecule is: (a) selected from the gRNA molecules of gRNA molecule embodiment 16, (b) selected from the gRNA molecules of gRNA molecule embodiment 17, (c) selected from the gRNA molecules of gRNA molecule embodiment 18, or (d) selected from the gRNA molecules of any of gRNA molecule embodiments 57-68.

[0123] In embodiments, including in any of the aforementioned composition aspects and embodiments, the invention provides a composition, including a first gRNA molecule and a second gRNA molecule, wherein:

(1) the first gRNA molecule is: (a) selected from the gRNA molecules of gRNA molecule embodiment 10, or (b) selected from the gRNA molecules of gRNA molecule embodiment 11; and
(2) the second gRNA molecule is: (a) selected from the gRNA molecules of gRNA molecule embodiment 13, (b) selected from the gRNA molecules of gRNA molecule embodiment 14.

[0124] In embodiments, including in any of the aforementioned composition aspects and embodiments, the invention provides a composition, including a first gRNA molecule and a second gRNA molecule, wherein:

(1) the first gRNA molecule is: (a) selected from the gRNA molecules of gRNA molecule embodiment 10, or (b) selected from the gRNA molecules of gRNA molecule embodiment 11; and
(2) the second gRNA molecule is: (a) selected from the gRNA molecules of gRNA molecule embodiment 16, (b) selected from the gRNA molecules of gRNA molecule embodiment 17, (c) selected from the gRNA molecules of gRNA molecule embodiment 18, or (d) selected from the gRNA molecules of any of gRNA molecule embodiments 57-68.

[0125] In embodiments, including in any of the aforementioned composition aspects and embodiments, the invention provides a composition, including a first gRNA molecule and a second gRNA molecule, wherein:

(1) the first gRNA molecule is: (a) selected from the gRNA molecules of gRNA molecule embodiment 13, (b) selected from the gRNA molecules of gRNA molecule embodiment 14; and
(2) the second gRNA molecule is: (a) selected from the gRNA molecules of gRNA molecule embodiment 16, (b) selected from the gRNA molecules of gRNA molecule embodiment 17, (c) selected from the gRNA molecules of gRNA molecule embodiment 18, or (d) selected from the gRNA molecules of any of gRNA molecule embodiments 57-68.

[0126] In embodiments, including in any of the aforementioned composition aspects and embodiments, the invention provides a composition, including a first gRNA molecule and a second gRNA molecule, wherein:

(1) the first gRNA molecule is: (a) selected from the gRNA molecules of gRNA molecule embodiment 16, (b) selected from the gRNA molecules of gRNA molecule embodiment 17, (c) selected from the gRNA molecules of gRNA molecule embodiment 18, or (d) selected from the gRNA molecules of any of gRNA molecule embodiments 57-68; and (2) the second gRNA molecule includes a targeting domain that is complementary to a target sequence of the beta globin gene; or
(1) the first gRNA molecule is: (a) selected from the gRNA molecules of gRNA molecule embodiment 4, (b) selected from the gRNA molecules of gRNA molecule embodiment 5, (c) selected from the gRNA molecules of gRNA molecule embodiment 6, (d) selected from the gRNA molecules of gRNA molecule embodiment 7, (e) selected from the gRNA molecules of any of gRNA molecule embodiments 41-56, (f) selected from the gRNA molecules of gRNA molecule embodiment 10, (g) selected from the gRNA molecules of gRNA molecule embodiment 11, (h) selected from the gRNA molecules of gRNA molecule embodiment 13, or (i) selected from the gRNA molecules of gRNA molecule embodiment 14; and (2) the second gRNA molecule includes a targeting domain that is complementary to a target sequence of the beta globin gene.

[0127] In embodiments, including in any of the aforementioned composition aspects and embodiments, the invention provides a composition, wherein the first gRNA molecule and the second gRNA molecule are independently selected from the gRNA molecules of any of gRNA molecule embodiments 41-68.

[0128] In embodiments of the composition, with respect to the gRNA molecule components of the composition, the composition consists of a first gRNA molecule and a second gRNA molecule.

[0129] In embodiments of the composition, each of said gRNA molecules is in a ribonuclear protein complex (RNP) with a Cas9 molecule described herein.

[0130] In embodiments, including in any of the aforementioned composition aspects and embodiments, the invention provides a composition, further including a template nucleic acid, wherein the template nucleic acid includes a nucleotide that corresponds to a nucleotide at or near the target sequence of the first gRNA molecule. In embodiments, the template nucleic acid includes nucleic acid encoding: (a) human beta globin, e.g., human beta globin including one or more of the mutations G 16D, E22A and T87Q, or fragment thereof; or (b) human gamma globin, or fragment thereof.

[0131] In embodiments, including in any of the aforementioned composition aspects and embodiments, the composition is formulated in a medium suitable for electroporation, for example, suitable for electroporation into HSPC cells. In embodiments of the composition which include one or more gRNA molecules, each of said gRNA molecules is in a RNP with a Cas9 molecule described herein, and wherein each of said RNP is at a concentration of less than about 10 uM, e.g., less than about 3 uM, e.g., less than about 1 uM, e.g., less than about 0.5 uM, e.g., less than about 0.3 uM, e.g., less than about 0.1 uM.

[0132] In another aspect, the invention provides a nucleic acid sequence that encodes one or more gRNA molecules described herein, for example, a gRNA molecule of any of the previous aspects and embodiments. In embodiments, the nucleic acid includes a promoter operably linked to the sequence that encodes the one or more gRNA molecules, for example, a promoter recognized by an RNA polymerase II or RNA polymerase III, for example, a U6 promoter or an HI promoter. In embodiments, the nucleic acid further encodes a Cas9 molecule, for example, described herein, for example, a Cas9 molecule that includes (e.g., consists of) any of SEQ ID NO: 6611, SEQ ID NO: 7821, SEQ ID NO: 7822, SEQ ID NO: 7823, SEQ ID NO: 7824, SEQ ID NO: 7825, SEQ ID NO: 7826, SEQ ID NO: 7827, SEQ ID NO: 7828, SEQ ID NO: 7829, SEQ ID NO: 7830, or SEQ ID NO: 7831. In embodiments, the nucleic acid includes a promoter operably linked to the sequence that encodes a Cas9 molecule, for example, an EF-1 promoter, a CMV IE gene promoter, an EF-1α promoter, an ubiquitin C promoter, or a phosphoglycerate kinase (PGK) promoter.

[0133] In another aspect, the invention provides a vector including the nucleic acid of any of the previous nucleic acid aspects and embodiments. In embodiments, the vector is selected from the group consisting of a lentiviral vector, an adenoviral vector, an adeno-associated viral (AAV) vector, a herpes simplex virus (HSV) vector, a plasmid, a minicircle, a nanoplasmid, and an RNA vector.

[0134] In another aspect, the invention provides a method of altering a cell (e.g., a population of cells), (e.g., altering the structure (e.g., sequence) of nucleic acid) at or near a target sequence within said cell, including contacting (e.g., introducing into) said cell (e.g., population of cells) with: 1) one or more gRNA molecules of any of the previous gRNA molecule aspects and embodiments and a Cas9 molecule (e.g., described herein); 2) one or more gRNA molecules of any of the previous gRNA molecule aspects and embodiments and nucleic acid encoding a Cas9 molecule (e.g., described herein); 3) nucleic acid encoding one or more gRNA molecules of any of the previous gRNA molecule aspects and embodiments and a Cas9 molecule (e.g., described herein); 4) nucleic acid encoding one or more gRNA molecules of any of the previous gRNA molecule aspects and embodiments and nucleic acid encoding a Cas9 molecule (e.g., described herein); 5) any of 1) to 4), above, and a template nucleic acid; 6) any of 1) to 4) above, and nucleic acid including sequence encoding a template nucleic acid; 7) the composition of any of the previous composition aspects and embodiments; or 8) the vector of any of the previous vector aspects and embodiments. In embodiments, the gRNA molecule or nucleic acid encoding the gRNA molecule, and the Cas9 molecule or nucleic acid encoding the Cas9 molecule, are formulated in a single composition. In other embodiments, the gRNA molecule or nucleic acid encoding the gRNA molecule, and the Cas9 molecule or nucleic acid encoding the Cas9 molecule, are formulated in more than one composition. In embodiments that include more than one composition, the more than one composition are delivered simultaneously or sequentially. In embodiments, the cell is an animal cell, for example, a mammalian, primate, or human cell. In embodiments, the cell, is a hematopoietic stem or progenitor cell (HSPC) (e.g., a population of HSPCs), for example, the cell is a CD34+ cell, for example, the cell is a CD34+CD90+ cell. In embodiments, the cell is disposed in a composition including a population of cells that has been enriched for CD34+ cells. In embodiments, the cell (e.g. population of cells) has been isolated from bone marrow, mobilized peripheral blood, or umbilical cord blood. In embodiments, the cell is autologous with respect to a patient to be administered said cell. In other embodiments, the cell is allogeneic with respect to a patient to be administered said cell. In embodiments, the method results in an indel at or near a genomic DNA sequence complementary to the targeting domain of the one or more gRNA molecules, for example, an indel shown on FIG. 25, Table 15, Table 26, Table 27 or Table 37, for example an indel associated with the targeting domain of the gRNA molecule as shown in FIG. 25, Table 15, Table 26, Table 27 or Table 37. In embodiments, the indel is an insertion or deletion of less than about 40 nucleotides, e.g., less than 30 nucleotides, e.g., less than 20 nucleotides, e.g., less than 10 nucleotides, for example, is a single nucleotide deletion. In embodiments, the method results in a population of cells wherein at least about 50%, e.g., at least about 60%, e.g., at least about 70%, e.g., at least about 80%, e.g., at least about 90% (e.g., at least about 95%, at least about 96%, at least about 97%, at least about 98%, or at least about 99%) of the cells of the population have been altered, e.g., include an indel. In embodiments, the method (e.g., the method performed on a population of cells, e.g., described herein) results in a cell (e.g., population of cells) that is capable of differentiating into a differentiated cell of an erythroid lineage (e.g., a red blood cell), and wherein said differentiated cell exhibits an increased level of fetal hemoglobin, e.g., relative to an unaltered cell (e.g., population of cells). In embodiments, the method results in a population of cells that is capable of differentiating into a population of differentiated cells, e.g., a population of cells of an erythroid lineage (e.g., a population of red blood cells), and wherein said population of differentiated cells has an increased fraction of F cells (e.g., at least about 15%, at least about 20%, at least about 25%, at least about 30%, or at least about 40% higher) e.g., relative to a population of unaltered cells. In embodiments, the method results in a cell that is capable of differentiating into a differentiated cell, e.g., a cell of an erythroid lineage (e.g., a red blood cell), and wherein said differentiated cell produces at least about 6 picograms (e.g., at least about 7 picograms, at least about 8 picograms, at least about 9 picograms, at least about 10 picograms, or from about 8 to about 9 picograms, or from about 9 to about 10 picograms) fetal hemoglobin per cell. In embodiments, the method is performed ex vivo. In other embodiments, the method is performed in vivo.

[0135] In another aspect, the invention provides a cell, altered by the method of altering a cell of any of the previous method aspects and embodiments.

[0136] In another aspect, the invention provides a cell, obtainable the method of altering a cell of any of the previous method aspects and embodiments.

[0137] In another aspect, the invention provides a cell, including a first gRNA molecule, e.g., described herein, e.g., of any of the previous gRNA molecule aspects and embodiments, or a composition, e.g., described herein, e.g., of any of the previous composition aspects and embodiments, a nucleic acid, e.g., described herein, e.g., of any of the previous nucleic acid aspects and embodiments, or a vector, e.g., described herein, e.g., of any of the previous vector aspects and embodiments. In embodiments, the cell further includes a Cas9 molecule, e.g., described herein, for example, a Cas9 molecule that includes, e.g., consists of, any of SEQ ID NO: 6611, SEQ ID NO: 7821, SEQ ID NO: 7822, SEQ ID NO: 7823, SEQ ID NO: 7824, SEQ ID NO: 7825, SEQ ID NO: 7826, SEQ ID NO: 7827, SEQ ID NO: 7828, SEQ ID NO: 7829, SEQ ID NO: 7830, or SEQ ID NO: 7831. In embodiments, the cell includes, has included, or will include a second gRNA molecule, e.g., described herein, e.g., of any of the previous gRNA molecule aspects and embodiments, or a nucleic acid encoding a second gRNA molecule, e.g., described herein, e.g., of any of the previous gRNA molecule aspects and embodiments, wherein the first gRNA molecule and second gRNA molecule include nonidentical targeting domains. In embodiments, expression of fetal hemoglobin is increased in said cell or its progeny (e.g., its erythroid progeny, e.g., its red blood cell progeny) relative to a cell or its progeny of the same cell type that has not been modified to include a gRNA molecule. In embodiments, the cell is capable of differentiating into a differentiated cell, e.g., a cell of an erythroid lineage (e.g., a red blood cell), and wherein said differentiated cell exhibits an increased level of fetal hemoglobin, e.g., relative to a cell of the same type that has not been modified to include a gRNA molecule. In embodiments, the differentiated cell (e.g., cell of an erythroid lineage, e.g., red blood cell) produces at least about 6 picograms (e.g., at least about 7 picograms, at least about 8 picograms, at least about 9 picograms, at least about 10 picograms, or from about 8 to about 9 picograms, or from about 9 to about 10 picograms) fetal hemoglobin, e.g., relative to a cell of the same type that has not been modified to include a gRNA molecule. In embodiments, the cell has been contacted, e.g., contacted ex vivo, with a stem cell expander, e.g., described herein, e.g., a stem cell expander that is compound 1, compound 2, compound 3, compound 4, or a combination thereof (e.g., compound 1 and compound 4), for example, a stem cell expander that is compound 4. In embodiments, including in any of the aforementioned aspects and embodiments, the cell includes an indel at or near a genomic DNA sequence complementary to the targeting domain of the gRNA molecule (as described herein, e.g., a gRNA molecule of any of the aforementioned aspects and embodiments) introduced therein, for example, an indel shown on FIG. 25, Table 15, Table 26, Table 27 or Table 37, for example an indel shown on FIG. 25, Table 15, Table 26, Table 27 or Table 37 that is associated with the gRNA molecule (as described herein, e.g., a gRNA molecule of any of the aforementioned aspects and embodiments) introduced therein. In embodiments, the indel is an insertion or deletion of less than about 40 nucleotides, e.g., less than 30 nucleotides, e.g., less than 20 nucleotides, e.g., less than 10 nucleotides, for example, the indel is a single nucleotide deletion. In embodiments, including in any of the aforementioned cell aspects and embodiments, the cell is an animal cell, for example, the cell is a mammalian, a primate, or a human cell. In embodiments, including in any of the aforementioned cell aspects and embodiments, the cell is a hematopoietic stem or progenitor cell (HSPC) (e.g., a population of HSPCs), for example, the cell is a CD34+ cell, for example, the cell is a CD34+CD90+ cell. In embodiments, including in any of the aforementioned cell aspects and embodiments, the cell (e.g. population of cells) has been isolated from bone marrow, mobilized peripheral blood, or umbilical cord blood. In embodiments, including in any of the aforementioned cell aspects and embodiments, the cell is autologous with respect to a patient to be administered said cell. In embodiments, the cell is allogeneic with respect to a patient to be administered said cell.

[0138] In another aspect, the invention provides a population of cells including the cell of any of the previous cell aspects and embodiments. In embodiments, at least about 50%, e.g., at least about 60%, e.g., at least about 70%, e.g., at least about 80%, e.g., at least about 90% (e.g., at least about 95%, at least about 96%, at least about 97%, at least about 98%, or at least about 99%) of the cells of the population are a cell according to any of the previous cell aspects and embodiments. In embodiments, the population of cells is capable of differentiating into a population of differentiated cells, e.g., a population of cells of an erythroid lineage (e.g., a population of red blood cells), and wherein said population of differentiated cells has an increased fraction of F cells (e.g., at least about 15%, at least about 20%, at least about 25%, at least about 30%, or at least about 40% higher) e.g., relative to a population of unmodified cells of the same type. In embodiments, the F cells of the population of differentiated cells produce an average of at least about 6 picograms (e.g., at least about 7 picograms, at least about 8 picograms, at least about 9 picograms, at least about 10 picograms, or from about 8 to about 9 picograms, or from about 9 to about 10 picograms) fetal hemoglobin per cell. In embodiments, the population includes: 1) at least 1e6 CD34+ cells/kg body weight of the patient to whom the cells are to be administered; 2) at least 2e6 CD34+ cells/kg body weight of the patient to whom the cells are to be administered; 3) at least 3e6 CD34+ cells/kg body weight of the patient to whom the cells are to be administered; 4) at least 4e6 CD34+ cells/kg body weight of the patient to whom the cells are to be administered; or 5) from 2e6 to 10e6 CD34+ cells/kg body weight of the patient to whom the cells are to be administered. In embodiments, at least about 40%, e.g., at least about 50%, (e.g., at least about 60%, at least about 70%, at least about 80%, or at least about 90%) of the cells of the population are CD34+ cells. In embodiments, at least about 10%, e.g., at least about 15%, e.g., at least about 20%, e.g., at least about 30% of the cells of the population are CD34+CD90+ cells. In embodiments, the population of cells is derived from bone marrow, peripheral blood (e.g., mobilized peripheral blood), umbilical cord blood, or induced pluripotent stem cells (iPSCs). In a preferred embodiment, the population of cells is derived from bone marrow. In embodiments, the population of cells includes, e.g., consists of, mammalian cells, e.g., human cells. In embodiments, the population of cells is autologous relative to a patient to which it is to be administered. In other embodiments, the population of cells is allogeneic relative to a patient to which it is to be administered.

[0139] In another aspect, the invention provides a composition including a cell of any of the previous cell aspects and embodiments, or the population of cells of any of previous population of cell aspects and embodiments. In embodiments, the composition includes a pharmaceutically acceptable medium, e.g., a pharmaceutically acceptable medium suitable for cryopreservation.

[0140] In another aspect, the invention provides a method of treating a hemoglobinopathy, including administering to a patient a cell of any of the previous cell aspects and embodiments, a population of cells of any of previous population of cell aspects and embodiments, or a composition of any of the previous composition aspects and embodiments. In embodiments, the hemoglobinopathy is a thalassemia, for example, beta-thalassemia, or sickle cell disease.

[0141] In another aspect, the invention provides a method of increasing fetal hemoglobin expression in a mammal, including administering to a patient a cell of any of the previous cell aspects and embodiments, a population of cells of any of previous population of cell aspects and embodiments, or a composition of any of the previous composition aspects and embodiments.

[0142] In another aspect, the invention provides a method of preparing a cell (e.g., a population of cells) including: (a) providing a cell (e.g., a population of cells) (e.g., a HSPC (e.g., a population of HSPCs)); (b) culturing said cell (e.g., said population of cells) ex vivo in a cell culture medium including a stem cell expander; and (c) introducing into said cell a first gRNA molecule (e.g., described herein, for example, a gRNA molecule of any of the previous gRNA molecule aspects and embodiments), a nucleic acid molecule encoding a first gRNA molecule (e.g., described herein, for example, a gRNA molecule of any of the previous gRNA molecule aspects and embodiments), a composition (e.g., described herein, for example, a composition of any of the previous composition aspects and embodiments), a nucleic acid (e.g., described herein, for example, a nucleic acid of any of the previous nucleic acid aspects and embodiments), or a vector (e.g., described herein, for example, a vector of any of the previous vector aspects and embodiments). In embodiments of said method, after said introducing of step (c), said cell (e.g., population of cells) is capable of differentiating into a differentiated cell (e.g., population of differentiated cells), e.g., a cell of an erythroid lineage (e.g., population of cells of an erythroid lineage), e.g., a red blood cell (e.g., a population of red blood cells), and wherein said differentiated cell (e.g., population of differentiated cells) produces increased fetal hemoglobin, e.g., relative to the same cells which have not been subjected to step (c). In embodiments, including in any of the aforementioned method aspects and embodiments, the stem cell expander is compound 1, compound 2, compound 3, compound 4 or a combination thereof (e.g., compound 1 and compound 4), for example, is compound 4. In embodiments, including in any of the aforementioned method aspects and embodiments, the cell culture medium includes thrombopoietin (Tpo), Flt3 ligand (Flt-3L), and human stem cell factor (SCF). In embodiments, including in any of the aforementioned method aspects and embodiments, the cell culture medium further includes human interleukin-6 (IL-6). In embodiments, including in any of the aforementioned method aspects and embodiments, the cell culture medium includes thrombopoietin (Tpo), Flt3 ligand (Flt-3L), and human stem cell factor (SCF) each at a concentration ranging from about 10 ng/mL to about 1000 ng/mL, for example, each at a concentration of about 50 ng/mL, e.g., at a concentration of 50 ng/mL. In embodiments, including in any of the aforementioned method aspects and embodiments, the cell culture medium includes human interleukin-6 (IL-6) at a concentration ranging from about 10 ng/mL to about 1000 ng/mL, for example, at a concentration of about 50 ng/mL, e.g., at a concentration of 50 ng/mL. In embodiments, including in any of the aforementioned method aspects and embodiments, the cell culture medium includes a stem cell expander at a concentration ranging from about 1 nM to about 1 mM, for example, at a concentration ranging from about 1 uM to about 100 uM, for example, at a concentration ranging from about 50 uM to about 75 uM, for example, at a concentration of about 50 uM, e.g., at a concentration of 50 uM, or at a concentration of about 75 uM, e.g., at a concentration of 75 uM. In embodiments, including in any of the aforementioned method aspects and embodiments, the culturing of step (b) includes a period of culturing before the introducing of step (c), for example, the period of culturing before the introducing of step (c) is at least 12 hours, e.g., is for a period of about 1 day to about 3 days, e.g., is for a period of about 1 day to about 2 days, e.g., is for a period of about 2 days. In embodiments, including in any of the aforementioned method aspects and embodiments, the culturing of step (b) includes a period of culturing after the introducing of step (c), for example, the period of culturing after the introducing of step (c) is at least 12 hours, e.g., is for a period of about 1 day to about 10 days, e.g., is for a period of about 1 day to about 5 days, e.g., is for a period of about 2 days to about 4 days, e.g., is for a period of about 2 days or is for a period of about 3 days or is for a period of about 4 days. In embodiments, including in any of the aforementioned method aspects and embodiments, the population of cells is expanded at least 4-fold, e.g., at least 5-fold, e.g., at least 10-fold, e.g., relative to cells which are not cultured according to step (b). In embodiments, including in any of the aforementioned method aspects and embodiments, the introducing of step (c) includes an electroporation, for example, an electroporation that includes 1 to 5 pulses, e.g., 1 pulse, and wherein each pulse is at a pulse voltage ranging from 700 volts to 2000 volts and has a pulse duration ranging from 10 ms to 100 ms. In embodiments, including in any of the aforementioned method aspects and embodiments, the electroporation includes, for example, consists of, 1 pulse. In embodiments, including in any of the aforementioned method aspects and embodiments, the pulse voltage ranges from 1500 to 1900 volts, e.g., is 1700 volts. In embodiments, including in any of the aforementioned method aspects and embodiments, the pulse duration ranges from 10 ms to 40 ms, e.g., is 20 ms. In embodiments, including in any of the aforementioned method aspects and embodiments, the cell (e.g., population of cells) provided in step (a) is a human cell (e.g., a population of human cells). In embodiments, including in any of the aforementioned method aspects and embodiments, the cell (e.g., population of cells) provided in step (a) is isolated from bone marrow, peripheral blood (e.g., mobilized peripheral blood), umbilical cord blood, or induced pluripotent stem cells (iPSCs), preferably bone marrow. In embodiments, including in any of the aforementioned method aspects and embodiments, the cell (e.g., population of cells) provided in step (a) is isolated from bone marrow, e.g., is isolated from bone marrow of a patient suffering from a hemoglobinopathy. In embodiments, including in any of the aforementioned method aspects and embodiments, the population of cells provided in step (a) is enriched for HSPCs, e.g., CD34+ cells. In embodiments, including in any of the aforementioned method aspects and embodiments, subsequent to the introducing of step (c), the cell (e.g., population of cells) is cryopreserved. In embodiments, including in any of the aforementioned method aspects and embodiments, subsequent to the introducing of step (c), the cell (e.g., population of cells) includes an indel at or near a genomic DNA sequence complementary to the targeting domain of the first gRNA molecule, for example, an indel shown on FIG. 25, Table 15, Table 26, Table 27 or Table 37, for example an indel shown in FIG. 25, Table 15, Table 26, Table 27 or Table 37 as associated with the first gRNA molecule. In embodiments, including in any of the aforementioned method aspects and embodiments, after the introducing of step (c), at least about 50%, at least about 60%, at least about 70%, at least about 80%, at least about 90%, at least about 95%, at least about 96%, at least about 97%, at least about 98% or at least about 99% of the cells of the population of cells include an indel at or near a genomic DNA sequence complementary to the targeting domain of the first gRNA molecule, for example, an indel shown on FIG. 25, Table 15, Table 26, Table 27 or Table 37, for example an indel shown in FIG. 25, Table 15, Table 26, Table 27 or Table 37 as associated with the first gRNA molecule.

[0143] In another aspect, the invention provides a cell (e.g., population of cells), obtainable by the method of preparing a cell of any of the previous aspects and embodiments. In another aspect, the invention provides a method of treating a hemoglobinopathy (for example a thalassemia (e.g., beta-thalassemia) or sickle cell disease), including administering to a human patient a composition including said cell (e.g., population of cells). In another aspect, the invention provides a method of increasing fetal hemoglobin expression in a human patient, including administering to said human patient a composition including said cell (e.g., population of cells). In embodiments, the human patient is administered a composition including at least about 1e6 cells (e.g., CD34+ cells, e.g., cells obtainable by a method of preparing a cell of any of the previous aspects and embodiments) per kg body weight of the human patient, e.g., at least about 1e6 CD34+ cells obtainable by a method of preparing a cell of any of the previous aspects and embodiments per kg body weight of the human patient. In embodiments, the human patient is administered a composition including at least about 2e6 cells (e.g., CD34+ cells, e.g., cells obtainable by a method of preparing a cell of any of the previous aspects and embodiments) per kg body weight of the human patient, e.g., at least about 2e6 CD34+ cells obtainable by a method of preparing a cell of any of the previous aspects and embodiments per kg body weight of the human patient. In embodiments, the human patient is administered a composition including from about 2e6 to about 10e6cells (e.g., CD34+ cells, e.g., cells obtainable by a method of preparing a cell of any of the previous aspects and embodiments) per kg body weight of the human patient, e.g., at least about 2e6 to about 10e6 CD34+ cells obtainable by a method of preparing a cell of any of the previous aspects and embodiments per kg body weight of the human patient.

[0144] In another aspect, the invention provides a gRNA molecule described herein, for example, a gRNA molecule of any of the previous gRNA molecule aspects and embodiments, a composition described herein, for example, a composition of any of the previous composition aspects and embodiments, a nucleic acid described herein, for example, a nucleic acid of any of the previous nucleic acid aspects and embodiments, a vector described herein, for example, a vector of any of the previous vector aspects and embodiments, a cell described herein, for example, a cell of any of the previous cell aspects and embodiments, or a population of cells described herein, for example, a population of cells of any of the previous population of cell aspects and embodiments, for use as a medicament.

[0145] In another aspect, the invention provides a gRNA molecule described herein, for example, a gRNA molecule of any of the previous gRNA molecule aspects and embodiments, a composition described herein, for example, a composition of any of the previous composition aspects and embodiments, a nucleic acid described herein, for example, a nucleic acid of any of the previous nucleic acid aspects and embodiments, a vector described herein, for example, a vector of any of the previous vector aspects and embodiments, a cell described herein, for example, a cell of any of the previous cell aspects and embodiments, or a population of cells described herein, for example, a population of cells of any of the previous population of cell aspects and embodiments, for use in the manufacture of a medicament.

[0146] In another aspect, the invention provides a gRNA molecule described herein, for example, a gRNA molecule of any of the previous gRNA molecule aspects and embodiments, a composition described herein, for example, a composition of any of the previous composition aspects and embodiments, a nucleic acid described herein, for example, a nucleic acid of any of the previous nucleic acid aspects and embodiments, a vector described herein, for example, a vector of any of the previous vector aspects and embodiments, a cell described herein, for example, a cell of any of the previous cell aspects and embodiments, or a population of cells described herein, for example, a population of cells of any of the previous population of cell aspects and embodiments, for use in the treatment of a disease.

[0147] In another aspect, the invention provides a gRNA molecule described herein, for example, a gRNA molecule of any of the previous gRNA molecule aspects and embodiments, a composition described herein, for example, a composition of any of the previous composition aspects and embodiments, a nucleic acid described herein, for example, a nucleic acid of any of the previous nucleic acid aspects and embodiments, a vector described herein, for example, a vector of any of the previous vector aspects and embodiments, a cell described herein, for example, a cell of any of the previous cell aspects and embodiments, or a population of cells described herein, for example, a population of cells of any of the previous population of cell aspects and embodiments, for use in the treatment of a disease, wherein the disease is a hemoglobinopathy, for example a thalassemia (e.g., beta-thalassemia) or sickle cell disease.

### BRIEF DESCRIPTION OF THE DRAWINGS

[0148] FIG. 1: Cas9 editing of the Bcl11a +58 erythroid enhancer region. Fraction of editing detected by NGS in HEK-293 Cas9GFP 24 h post-delivery of crRNA targeting the +58 enhancer region and trRNA by lipofection. Each dot indicates a different crRNA, the trRNA was held constant. Genomic coordinates indicate location on Chromosome 2, e.g., in reference to hg38. (n=1)

[0149] FIG. 2: Cas9 editing of the Bcl11a +62 erythroid enhancer region. Fraction of editing detected by NGS in HEK-293 Cas9GFP 24 h post-delivery of crRNA targeting the +62 enhancer region and trRNA by lipofection. Each dot indicates a different crRNA, the trRNA was held constant. Genomic coordinates indicate location on Chromosome 2, e.g., in reference to hg38. (n=1)

[0150] FIG. 3. Gating strategy for selection of cells after introduction of the Cas9 editing system.

[0151] FIG. 4. Agarose gel electrophoresis of gene fragments from Cas9 editing system-treated CD34+ cells (shown are both CD34+CD90+ and CD34+CD90− cell populations, together with reference unsorted cells). The upper band represents uncleaved homoduplex DNA and the lower bands indicate cleavage products resulting from heteroduplex DNA. The far left lane is a DNA ladder. Band intensity was calculated by peak integration of unprocessed images by ImageJ software. % gene modification (indel) was calculated as follows: % gene modification=100×(1−(1−fraction cleaved)^{1/2}), and is indicated below each corresponding lane of the gel.

[0152] FIG. 5. Erythroid enhancer region showing the sites of genomic DNA targeted by sgRNA molecules comprising targeting domains complimentary to the underlined nucleotides.

[0153] FIG. 6A/6B. NGS results for indel formation by sgEH1 (CR00276) (A) or sgEH2 (CR00275) (B) in CD34+ HSC cells. Insertions are in uppercase. Deletions are indicated by a dashed line. Regions of microhomology near the cutting site are highlighted in bold underline.

[0154] FIG. 6C/6D. NGS results for indel formation by sgEH8 (CR00273) (C) or sgEH9 (CR00277) (D) in CD34+ HSC cells. Insertions are in uppercase. Deletions are indicated by a dashed line. Regions of microhomology near the cutting site are highlighted in bold underline.

[0155] FIG. 7. NGS results and indel pattern formation across multiple donors for g7, g8 and g2. The sequences of the top 3 indels from two biological replicate experiments using g7 and g8 were identical, and the sequence of the top 3 indels using g2 were identical to those from a previous experiment.

[0156] FIG. 8. NGS results and indel pattern formation using a modified gRNA scaffold (BC). The sequences of the top 3 indels from these experiments are identical to those formed when using the standard gRNA scaffold.

[0157] FIG. 9. Comparison of indel pattern across different delivery methods. AVG % refers to the % of NGS reads exhibiting the indel indicated (Average of 2 experiments).

[0158] FIG. 10. Indel formation by co-introduction of g7 gRNA and g8 gRNA with either a non-extended flagpole region (“reg”) or with a first flagpole extension and first tracr extension (“BC”). PAM sequences for the two gRNAs are boxed.

[0159] FIG. 11: Top gRNA sequences directed to +58 enhancer region of BCL11a gene in CD34+ cells, as measured by NGS (n=3).

[0160] FIG. 12: Top gRNA sequences directed to +62 enhancer region of BCL11a gene in CD34+ cells, as measured by NGS (n=3).

[0161] FIG. 13: Predicted excision sizes when 2 gRNA molecules targeting the BCL11a +62 enhancer locus are introduced into HEK293_Cas9 cells, when either CR00187 (light grey bars) or CR00202 (dark grey bars) is held constant and co-inserted into the cells with a second gRNA molecule including the targeting domain of the gRNA indicated.

[0162] FIG. 14: Excision of genomic DNA within the +62 enhancer of BCL11a by addition of gRNA molecules including the targeting domain of CR00187 and the second gRNA molecule indicated in the graph. Stars (*) indicate excision observed at a frequency greater than 30%; Carats (̂) indicate excision observed at a lower frequency (<30%). Those predicted excision products resulting in a fragment less than 50 nt could not be distinguished.

[0163] FIG. 15: Excision of genomic DNA within the +62 enhancer of BCL11a by addition of gRNA molecules including the targeting domain of CR00202 and the second gRNA molecule indicated in the graph. Stars (*) indicate excision observed at a frequency greater than 30%; Carats (̂) indicate excision observed at lower frequency (<30%).

[0164] FIG. 16: % indel formation by 192 gRNA molecules targeted to the French HPFH region (Sankaran V G et al. A functional element necessary for fetal hemoglobin silencing. NEJM (2011) 365:807-814.)

[0165] FIG. 17. Experimental scheme of Cas9:gRNA ribonucleoprotein (Cas9-RNP) delivery to primary human CD34+ HSPC for genome editing, followed by genetic and phenotypic characterization.

[0166] FIG. 18. Cell viability following mock electroporation or electroporation of Cas9-RNP complexes into CD34+ HSPC. The HSPC were expanded in vitro for 48 hours after electroporation of RNP complexes and the cell viability monitored and percent viability determined. The names of gRNAs used to make RNP complexes are shown on x-axis and the corresponding cell viabilities on y-axis. The CRxxxx identifier indicates the targeting domain of the gRNA molecule.

[0167] FIG. 19. Mismatch detection using T7 endonuclease assay Human HSC were electroporated to deliver RNP complexes to introduce indels into +58 DHS region of BCL11A erythroid enhancer by NHEJ. PCR amplicons spanning the target region was subjected to the T7E1 assay and the resulting fragments analyzed by 2% agarose gel electrophoresis. Regions of +58 erythroid enhancer BCL11A were disrupted by both guide RNA formats (dual guide RNA—black; single guide RNA—gray (bottom graph and g7BCL11a-BC(1) and g7BCL11A-BC(2) from top graph)). The intensities of DNA bands were estimated by the ImageJ software (http://rsb.info.nih.gov/ij/) to determine the percent of edited alleles. Names of gRNAs used and corresponding gene editing efficiencies determined from mismatch detection assay are also shown in the table below the gel image.

[0168] FIG. 20: Percent allele editing by next generation sequencing. Labels are as described for FIGS. 18 and 19.

[0169] FIG. 21. Colony forming cell (CFC) unit assay showing colony number and types of colonies observed for five select gRNAs. The HSPCs genome edited at the +58 erythroid enhancer were plated in methylcellulose and clonal colonies classified and counted based on the number and types of mature cells using morphological and phenotypic criteria using STEMvision. The colonies were classified into colony forming unit-erythroid (CFU-E), burst forming unit-erythroid (BFU-E), colony-forming unit-granulocyte/macrophage (CFU-GM) and colony-forming unit-granulocyte/erythrocyte/macrophage/megakaryocyte (CFU-GEMM).

[0170] FIG. 22. Kinetics of cell division during erythroid differentiation. Total number of cells determined on day 0, 7, 14 and 21 during erythroid differentiation and the fold cell expansion calculated.

[0171] FIG. 23. BCL11A, gamma and beta-globin mRNA levels in genome edited and erythroid differentiated HSC. Relative mRNA expression of BCL11A, gamma- and beta-globin chains in unilineage erythroid cultures were quantified by real time PCR. Transcript levels were normalized against human GAPDH transcript levels.

[0172] FIG. 24A. Efficient editing of HSC obtained with dual gRNA/cas9 system for disruption of BCL11a enhancer (+58) resulted in high levels of induction of HbF. The HSC 48 hours after electroporation were subjected to in vitro erythroid differentiation and HbF expression was measured. The percent of HbF positive cells (F-cells) was monitored by FACS analysis at days 7, 14 and 21. Data shown in this figure was generated with dgRNA systems where the dgRNA included the indicated targeting domain.

[0173] FIG. 24B. Efficient editing of HSC obtained with sgRNA/cas9 system for disruption of BCL11a enhancer (+58) resulted in high levels of induction of HbF. The HSC 48 hours after electroporation were subjected to in vitro erythroid differentiation and HbF expression was measured. The percent of HbF positive cells (F-cells) was monitored by FACS analysis at days 7, 14 and 21. Data shown in this figure was generated with sgRNA systems where the sgRNA included the indicated targeting domain.

[0174] FIG. 25: Indel pattern produced in HSPCs by gRNAs including the indicated targeting domain.

[0175] FIG. 26A: Phenotyping of edited and unedited cultures in CD34+ cell expansion medium by cell surface marker staining. All gRNA molecules were tested in the dgRNA format. The Tmcr used was SEQ ID NO: 7808, and the crRNA had the following format and sequence with 2′O-Methyl (m) and Phosphorothioate Bond (*) modifications indicated: mN*mN*mN*rNrNrNrNrNrNrNrNrNrNrNrNrNrNrNrNrNrGrUrUrUrUrArGrArGrCrUrArU*mG*m C*mU, where N's are the residues of the indicated targeting domain. Shown are representative dot plots showing the fluorescence of cells stained with each antibody panel or corresponding isotype controls as described in Materials and Methods. Cells shown were pre-gated on the viable cell population by forward and side scatter properties and DAPI (4′,6-Diamidino-2-Phenylindole) discrimination. The percentage of each cell population named at the top of the plot was determined by the gate indicated by the bold lined box.

[0176] FIG. 26B: Phenotyping of edited and unedited cultures in CD34+ cell expansion medium by cell surface marker staining. All gRNA molecules were tested in the dgRNA format. The Tmcr used was SEQ ID NO: 7808, and the crRNA had the following format and sequence with 2′O-Methyl (m) and Phosphorothioate Bond (*) modifications indicated: mN*mN*mN*rNrNrNrNrNrNrNrNrNrNrNrNrNrNrNrNrNrGrUrUrUrUrArGrArGrCrUrArU*mG*m C*mU, where N's are the residues of the indicated targeting domain Shown is the percentage of each named cell population in edited and unedited cultures. Targeting domain of the edited cultures is as indicated.

[0177] FIG. 27. % F cells in erythrocytes differentiated from populations of CD34+ cells edited with RNPs comprising dgRNAs targeting two sites within the HPFH region. “g2” is the positive control (targeting domain to a coding region of BCL11a gene); “cntrl” is negative control (introduction of Cas9 only).

[0178] FIG. 28A. % Editing as determined by NGS in CD34+ HSPCs at day 2 following electroporation of RNP comprising the indicated dgRNA (unmod or modified as indicated). Controls include dgRNA comprising the targeting domain of CR00317 unmodified (CR00317-m), or electroporation in buffer only (No Cas9 or gRNA; “Mock”).

[0179] FIG. 28B. % Editing as determined by NGS in CD34+ HSPCs at day 2 following electroporation of RNP comprising the indicated dgRNA (unmod or modified as indicated). Controls include electroporation in buffer only (No Cas9 or gRNA; “Mock”).

[0180] FIG. 29. % Editing as determined by NGS in CD34+ HSPCs at day 2 following electroporation of RNP comprising the indicated sgRNA (unmod or modified as indicated. In each case the number corresponds to the CRxxxxxx identifier of the targeting domain, for example, Unmod sg312 refers to unmodified sgRNA comprising the targeting domain of CR00312). Controls include electroporation of Cas9 protein only (“Cas9”), electroporation with buffer only (“mock”), or with no electroporation (“WT”).

[0181] FIG. 30A. Normalized % Erythrocytes (% F cells in “Mock” subtracted) that are HbF+ after electroporation of CD34+ HSPCs with RNP comprising the indicated dgRNA (unmod or modified as indicated) and then induced to differentiate by culture in erythroid differentiation medium. Controls include electroporation of buffer only (“mock”).

[0182] FIG. 30B. Normalized % Erythrocytes (% F cells in “Mock” subtracted) that are HbF+ after electroporation of CD34+ HSPCs with RNP comprising the indicated dgRNA (unmod or modified as indicated) and then in induced to differentiate by culture in erythroid differentiation medium. Controls include electroporation of buffer only (“mock”).

[0183] FIG. 31. Normalized % Erythrocytes (% F cells in “Mock” subtracted) that are HbF+ after electroporation of CD34+ HSPCs with RNP comprising the indicated sgRNA (unmod or modified as indicated. In each case the number corresponds to the CRxxxxxx identifier of the targeting domain, for example, Unmod sg312 refers to unmodified sgRNA comprising the targeting domain of CR00312) and then in induced to differentiate by culture in erythroid differentiation medium. Controls include electroporation of Cas9 protein and tracr only (“Cas9+TracRNA only”), electroporation with buffer only (“Cells only+Pulse”), or with no electroporation (“Cells only no pulse”).

[0184] FIG. 32. Fold total cell expansion in culture at day 14 after erythroid differentiation after electroporation of RNP comprising the indicated sgRNA (in each case, the number corresponds to the CRxxxxxx identifier of the targeting domain, for example, Unmod sg312 refers to unmodified sgRNA comprising the targeting domain of CR00312) into CD34+ cells. Controls include electroporation of Cas9 protein and tracr only (“Cas9+TracRNA only”), electroporation with buffer only (“Cells only+Pulse”), or with no electroporation (“Cells only no pulse”).

[0185] FIG. 33. Assessment of potential off-target sites cleaved by Cas9 directed by dgRNA molecules targeting the BCL11a enhancer region. Triangles represent the on-target site while open circles represent a potential off-target site for each guide RNA tested.

[0186] FIG. 34. Editing efficiency at targeted B2M locus in CD34+ hematopoietic stem cells by different Cas9 variants, as evaluated by NGS and Flow cytometry. NLS=SV40 NLS; His6 or His8 refers to 6 or 8 histidine residues, respectively; TEV=tobacco etch virus cleavage site; Cas9=wild type S. pyogenes Cas9—mutations or variants are as indicated).

[0187] FIG. 35. Data show fold increase in cell number after a total of 10 days of culturing in expansion medium (3 days of culturing prior to electroporation and 7 days of culturing following electroporation). With all the guide RNAs tested, including both single and dual guide RNA formats, cell expansion ranged from 2-7 fold. CR00312 and CR001128, indicated by arrows, demonstrated a 3-6 fold increase after 10 days of cell expansion. Lables “Crxxxx” refer to dgRNA having the indicated targeting domain; “sgxxxx” refer to sgRNA having the targeting domain of the CRxxxxx identifier with the same number (e.g., sg312 has the targeting domain of CR00312); “Unmod” indicates no modification to theRNA(s); “O'MePS”, when used in relation to a dgRNA refers to a crRNA which has three 3′ and three 5′ 2′-OMe modifications and phosphorothioate bonds, paired with an unmodified tracr; “O'MePS”, when used in relation to a sgRNA refers to gRNA which has three 5′-terminal 2′-OMe modifications and phosphorothioate bonds, three 3′-terminal phosphorothioate bonds, and three 2′OMe modifications of the 4^{th}-to-last, 3^{rd}-to-last and 2^{nd}-to-last 3′ nucleotides.

[0188] FIG. 36. Gating strategy to distinguish different HSPC subpopulations.

[0189] FIG. 37. Frequency of each hematopoietic subset after 48 hours ex vivo culture in the indicated medium (STF modified with IL6, Compound 4, or both IL6 and Compound 4), but before electroporation of a CRISPR system. STF=StemSpan SFEM.

[0190] FIG. 38. Frequency of each hematopoietic subset 7 days after electroporation introducing a CRISPR system targeting the +58 enhancer of BCL11a, cultured in the indicated medium (STF modified with IL6, Compound 4, or both IL6 and Compound 4). STF=StemSpan SFEM.

[0191] FIG. 39A. Cell viability upon gene editing using different RNP concentrations, with RNP containing dgRNAs targeting the +58 region.

[0192] FIG. 39B. Cell viability upon gene editing using different RNP concentrations, with RNP containing sgRNAs targeting the +58 region.

[0193] FIG. 40A. Gene editing efficiency measured by NGS upon gene editing using different RNP concentrations, with RNP containing dgRNAs targeting the +58 region.

[0194] FIG. 40B Gene editing efficiency measured by NGS upon gene editing using different RNP concentrations, with RNP containing sgRNAs targeting the +58 region.

[0195] FIG. 41A. Percentage of HbF induction measured by flow cytometry upon gene editing using different RNP concentrations, with RNP containing dgRNAs targeting the +58 region.

[0196] FIG. 41B Percentage of HbF induction measured by flow cytometry upon gene editing using different RNP concentrations, with RNP containing sgRNAs targeting the +58 region.

[0197] FIG. 42A. Gene editing efficiencies of RNPs with different Cas9 proteins. Gene editing was performed using different Cas9 variants (listed on the X-axis) coupled with either the unmodified version of sgRNA CR00312 and sgRNA CR001128, or a modified version of sgRNA CR00312 and sgRNA CR001128. Edited cells were subjected to NGS to determine % edit (Y-axis).

[0198] FIG. 42B. Induction of HbF+ cells upon gene editing using different Cas9 proteins. Gene editing was performed using different Cas9 variants (listed on the X-axis) coupled with either the unmodified version of sgRNA CR00312 and sgRNA CR001128, or a modified version of sgRNA CR00312 and sgRNA CR001128. Edited cells were differentiated into erythroid lineage and HbF production assessed by flow cytometry using an anti-HbF antibody conjugated with fluorophore.

[0199] FIG. 43. % Editing as determined by NGS in CD34+ HSPCs by electroporation of RNP comprising the indicated dgRNA or sgRNA (unmod or modified as indicated) (labels refer to the gRNA sequences as indicated in Table 36). Editing was determined at either 2 days (black bars) or 6 days (gray bars) post-electroporation. Less than 1.5% editing was detected at each site after control electroporation of Cas9 protein and Tracr only (“none”, data not shown). Mean+standard deviation of 2 electroporation replicates is shown.

[0200] FIG. 44. Percent of viable cells that are CD71+ after electroporation into CD34+ HSPCs of RNP comprising the indicated dgRNA or sgRNA (unmod or modified as indicated) (labels refer to the gRNA sequences as indicated in Table 36) and culture in erythroid differentiation conditions for 7 days. After electroporation, cells were maintained by Protocol 1 (black bars) or Protocol 2 (gray bars), as described in Example 4.7. Controls include electroporation of Cas9 protein and Tracr only (“none”). Mean+standard deviation of 2 electroporation replicates is shown.

[0201] FIG. 45. Percent of erythroid cells that are HbF+ after electroporation into CD34+ HSPCs of RNP comprising the indicated dgRNA or sgRNA (unmod or modified as indicated) (labels refer to the gRNA sequences as indicated in Table 36) and culture in erythroid differentiation conditions for 7 days. After electroporation, cells were maintained by Protocol 1 (black bars) or Protocol 2 (gray bars), as described in Example 4.7. Controls include electroporation of Cas9 protein and Tracr only (“none”). Mean+standard deviation of 2 electroporation replicates is shown.

[0202] FIG. 46. Percent of cells that are HbF+ after electroporation into CD34+ HSPCs of RNP comprising the indicated dgRNA or sgRNA (unmod or modified as indicated) (labels refer to the gRNA sequences as indicated in Table 36) and cultured in erythroid differentiation conditions for 14 days. After electroporation, cells were maintained by Protocol 1 (black bars) or Protocol 2 (gray bars), as described in Example 4.7. Controls include electroporation of Cas9 protein and Tracr only (“none”). Mean+standard deviation of 2 electroporation replicates is shown.

[0203] FIG. 47. Percent of cells that are HbF+ after electroporation into CD34+ HSPCs of RNP comprising the indicated dgRNA or sgRNA (unmod or modified as indicated) (labels refer to the gRNA sequences as indicated in Table 36) and cultured in erythroid differentiation conditions for 21 days. After electroporation, cells were maintained by Protocol 1 (black bars) or Protocol 2 (gray bars), as described in Example 4.7. Controls include electroporation of Cas9 protein and Tracr only (“none”). Mean+standard deviation of 2 electroporation replicates is shown.

[0204] FIG. 48. Fold total cell expansion in erythroid differentiation culture for 7 (black bars) or 21 days (black bars) after electroporation into CD34+ HSPCs of RNP comprising the indicated dgRNA or sgRNA (unmod or modified as indicated) (labels refer to the gRNA sequences as indicated in Table 36). After electroporation, cells were maintained by Protocol 2, as described in Example 4.7. Controls include electroporation of Cas9 protein and Tracr only (“none”). Mean+standard deviation of 2 electroporation replicates is shown.

[0205] FIG. 49. Assessment of potential off-target sites cleaved by Cas9 directed by dgRNA molecules targeting an HPFH region. Triangles represent the on-target site while open circles represent a potential off-target site for each guide RNA tested.

### DEFINITIONS

[0206] The terms “CRISPR system,” “Cas system” or “CRISPR/Cas system” refer to a set of molecules comprising an RNA-guided nuclease or other effector molecule and a gRNA molecule that together are necessary and sufficient to direct and effect modification of nucleic acid at a target sequence by the RNA-guided nuclease or other effector molecule. In one embodiment, a CRISPR system comprises a gRNA and a Cas protein, e.g., a Cas9 protein. Such systems comprising a Cas9 or modified Cas9 molecule are referred to herein as “Cas9 systems” or “CRISPR/Cas9 systems.” In one example, the gRNA molecule and Cas molecule may be complexed, to form a ribonuclear protein (RNP) complex.

[0207] The terms “guide RNA,” “guide RNA molecule,” “gRNA molecule” or “gRNA” are used interchangeably, and refer to a set of nucleic acid molecules that promote the specific directing of a RNA-guided nuclease or other effector molecule (typically in complex with the gRNA molecule) to a target sequence. In some embodiments, said directing is accomplished through hybridization of a portion of the gRNA to DNA (e.g., through the gRNA targeting domain), and by binding of a portion of the gRNA molecule to the RNA-guided nuclease or other effector molecule (e.g., through at least the gRNA tracr). In embodiments, a gRNA molecule consists of a single contiguous polynucleotide molecule, referred to herein as a “single guide RNA” or “sgRNA” and the like. In other embodiments, a gRNA molecule consists of a plurality, usually two, polynucleotide molecules, which are themselves capable of association, usually through hybridization, referred to herein as a “dual guide RNA” or “dgRNA,” and the like. gRNA molecules are described in more detail below, but generally include a targeting domain and a tracr. In embodiments the targeting domain and tracr are disposed on a single polynucleotide. In other embodiments, the targeting domain and tracr are disposed on separate polynucleotides.

[0208] The term “targeting domain” as the term is used in connection with a gRNA, is the portion of the gRNA molecule that recognizes, e.g., is complementary to, a target sequence, e.g., a target sequence within the nucleic acid of a cell, e.g., within a gene.

[0209] The term “crRNA” as the term is used in connection with a gRNA molecule, is a portion of the gRNA molecule that comprises a targeting domain and a region that interacts with a tracr to form a flagpole region.

[0210] The term “target sequence” refers to a sequence of nucleic acids complimentary, for example fully complementary, to a gRNA targeting domain. In embodiments, the target sequence is disposed on genomic DNA. In an embodiment the target sequence is adjacent to (either on the same strand or on the complementary strand of DNA) a protospacer adjacent motif (PAM) sequence recognized by a protein having nuclease or other effector activity, e.g., a PAM sequence recognized by Cas9. In embodiments, the target sequence is a target sequence within a gene or locus that affects expression of a globin gene, e.g., that affects expression of beta globin or fetal hemoglobin (HbF). In embodiments, the target sequence is a target sequence within the globin locus. In embodiments, the target sequence is a target sequence within the BCL11a gene. In embodiments, the target sequence is a target sequence within the BCL11a enhancer region. In embodiments, the target sequence is a target sequence within a HPFH region.

[0211] The term “flagpole” as used herein in connection with a gRNA molecule, refers to the portion of the gRNA where the crRNA and the tracr bind to, or hybridize to, one another.

[0212] The term “tracr” as used herein in connection with a gRNA molecule, refers to the portion of the gRNA that binds to a nuclease or other effector molecule. In embodiments, the tracr comprises nucleic acid sequence that binds specifically to Cas9. In embodiments, the tracr comprises nucleic acid sequence that forms part of the flagpole.

[0213] The terms “Cas9” or “Cas9 molecule” refer to an enzyme from bacterial Type II CRISPR/Cas system responsible for DNA cleavage. Cas9 also includes wild-type protein as well as functional and non-functional mutants thereof. In embodiments, the Cas9 is a Cas9 of S. pyogenes.

[0214] The term “complementary” as used in connection with nucleic acid, refers to the pairing of bases, A with T or U, and G with C. The term complementary refers to nucleic acid molecules that are completely complementary, that is, form A to T or U pairs and G to C pairs across the entire reference sequence, as well as molecules that are at least 80%, 85%, 90%, 95%, 99% complementary.

[0215] “Template Nucleic Acid” as used in connection with homology-directed repair or homologous recombination, refers to nucleic acid to be inserted at the site of modification by the CRISPR system donor sequence for gene repair (insertion) at site of cutting.

[0216] An “indel,” as the term is used herein, refers to a nucleic acid comprising one or more insertions of nucleotides, one or more deletions of nucleotides, or a combination of insertions and delections of nucleotides, relative to a reference nucleic acid, that results after being exposed to a composition comprising a gRNA molecule, for example a CRISPR system. Indels can be determined by sequencing nucleic acid after being exposed to a composition comprising a gRNA molecule, for example, by NGS. With respect to the site of an indel, an indel is said to be “at or near” a reference site (e.g., a site complementary to a targeting domain of a gRNA molecule) if it comprises at least one insertion or deletion within about 10, 9, 8, 7, 6, 5, 4, 3, 2, or 1 nucleotide(s) of the reference site, or is overlapping with part or all of said reference site (e.g., comprises at least one insertion or deletion overlapping with, or within 10, 9, 8, 7, 6, 5, 4, 3, 2, or 1 nucleotides of a site complementary to the targeting domain of a gRNA molecule, e.g., a gRNA molecule described herein).

[0217] An “indel pattern,” as the term is used herein, refers to a set of indels that results after exposure to a composition comprising a gRNA molecule. In an embodiment, the indel pattern consists of the top three indels, by frequency of appearance. In an embodiment, the indel pattern consists of the top five indels, by frequency of appearance. In an embodiment, the indel pattern consists of the indels which are present at greater than about 5% frequency relative to all sequencing reads. In an embodiment, the indel pattern consists of the indels which are present at greater than about 10% frequency relative to to total number of indel sequencing reads (i.e., those reads that do not consist of the unmodified reference nucleic acid sequence). In an embodiment, the indel pattern includes of any 3 of the top five most frequently observed indels. The indel pattern may be determined, for example, by sequencing cells of a population of cells which were exposed to the gRNA molecule.

[0218] An “off-target indel,” as the term I used herein, refers to an indel at or near a site other than the target sequence of the targeting domain of the gRNA molecule. Such sites may comprise, for example, 1, 2, 3, 4, 5 or more mismatch nucleotides relative to the sequence of the targeting domain of the gRNA. In exemplary embodiments, such sites are detected using targeted sequencing of in silico predicted off-target sites, or by an insertional method known in the art.

[0219] The term “a” and “an” refers to one or to more than one (i.e., to at least one) of the grammatical object of the article. By way of example, “an element” means one element or more than one element.

[0220] The term “about” when referring to a measurable value such as an amount, a temporal duration, and the like, is meant to encompass variations of ±20% or in some instances ±10%, or in some instances ±5%, or in some instances ±1%, or in some instances ±0.1% from the specified value, as such variations are appropriate to perform the disclosed methods.

[0221] The term “antigen” or “Ag” refers to a molecule that provokes an immune response. This immune response may involve either antibody production, or the activation of specific immunologically-competent cells, or both. The skilled artisan will understand that any macromolecule, including virtually all proteins or peptides, can serve as an antigen. Furthermore, antigens can be derived from recombinant or genomic DNA. A skilled artisan will understand that any DNA, which comprises a nucleotide sequences or a partial nucleotide sequence encoding a protein that elicits an immune response therefore encodes an “antigen” as that term is used herein. Furthermore, one skilled in the art will understand that an antigen need not be encoded solely by a full length nucleotide sequence of a gene. It is readily apparent that the present invention includes, but is not limited to, the use of partial nucleotide sequences of more than one gene and that these nucleotide sequences are arranged in various combinations to encode polypeptides that elicit the desired immune response. Moreover, a skilled artisan will understand that an antigen need not be encoded by a “gene” at all. It is readily apparent that an antigen can be synthesized or can be derived from a biological sample, or might be macromolecule besides a polypeptide. Such a biological sample can include, but is not limited to a tissue sample, a cell or a fluid with other biological components.

[0222] The term “autologous” refers to any material derived from the same individual into whom it is later to be re-introduced.

[0223] The term “allogeneic” refers to any material derived from a different animal of the same species as the individual to whom the material is introduced. Two or more individuals are said to be allogeneic to one another when the genes at one or more loci are not identical. In some aspects, allogeneic material from individuals of the same species may be sufficiently unlike genetically to interact antigenically

[0224] The term “xenogeneic” refers to a graft derived from an animal of a different species.

[0225] “Derived from” as that term is used herein, indicates a relationship between a first and a second molecule. It generally refers to structural similarity between the first molecule and a second molecule and does not connotate or include a process or source limitation on a first molecule that is derived from a second molecule.

[0226] The term “encoding” refers to the inherent property of specific sequences of nucleotides in a polynucleotide, such as a gene, a cDNA, or an mRNA, to serve as templates for synthesis of other polymers and macromolecules in biological processes having either a defined sequence of nucleotides (e.g., rRNA, tRNA and mRNA) or a defined sequence of amino acids and the biological properties resulting therefrom. Thus, a gene, cDNA, or RNA, encodes a protein if transcription and translation of mRNA corresponding to that gene produces the protein in a cell or other biological system. Both the coding strand, the nucleotide sequence of which is identical to the mRNA sequence and is usually provided in sequence listings, and the non-coding strand, used as the template for transcription of a gene or cDNA, can be referred to as encoding the protein or other product of that gene or cDNA.

[0227] Unless otherwise specified, a “nucleotide sequence encoding an amino acid sequence” includes all nucleotide sequences that are degenerate versions of each other and that encode the same amino acid sequence. The phrase nucleotide sequence that encodes a protein or a RNA may also include introns to the extent that the nucleotide sequence encoding the protein may in some version contain an intron(s).

[0228] The term “effective amount” or “therapeutically effective amount” are used interchangeably herein, and refer to an amount of a compound, formulation, material, or composition, as described herein effective to achieve a particular biological result.

[0229] The term “endogenous” refers to any material from or produced inside an organism, cell, tissue or system.

[0230] The term “exogenous” refers to any material introduced from or produced outside an organism, cell, tissue or system.

[0231] The term “expression” refers to the transcription and/or translation of a particular nucleotide sequence driven by a promoter.

[0232] The term “transfer vector” refers to a composition of matter which comprises an isolated nucleic acid and which can be used to deliver the isolated nucleic acid to the interior of a cell. Numerous vectors are known in the art including, but not limited to, linear polynucleotides, polynucleotides associated with ionic or amphiphilic compounds, plasmids, and viruses. Thus, the term “transfer vector” includes an autonomously replicating plasmid or a virus. The term should also be construed to further include non-plasmid and non-viral compounds which facilitate transfer of nucleic acid into cells, such as, for example, a polylysine compound, liposome, and the like. Examples of viral transfer vectors include, but are not limited to, adenoviral vectors, adeno-associated virus vectors, retroviral vectors, lentiviral vectors, and the like.

[0233] The term “expression vector” refers to a vector comprising a recombinant polynucleotide comprising expression control sequences operatively linked to a nucleotide sequence to be expressed. An expression vector comprises sufficient cis-acting elements for expression; other elements for expression can be supplied by the host cell or in an in vitro expression system. Expression vectors include all those known in the art, including cosmids, plasmids (e.g., naked or contained in liposomes) and viruses (e.g., lentiviruses, retroviruses, adenoviruses, and adeno-associated viruses) that incorporate the recombinant polynucleotide.

[0234] The term “homologous” or “identity” refers to the subunit sequence identity between two polymeric molecules, e.g., between two nucleic acid molecules, such as, two DNA molecules or two RNA molecules, or between two polypeptide molecules. When a subunit position in both of the two molecules is occupied by the same monomeric subunit; e.g., if a position in each of two DNA molecules is occupied by adenine, then they are homologous or identical at that position. The homology between two sequences is a direct function of the number of matching or homologous positions; e.g., if half (e.g., five positions in a polymer ten subunits in length) of the positions in two sequences are homologous, the two sequences are 50% homologous; if 90% of the positions (e.g., 9 of 10), are matched or homologous, the two sequences are 90% homologous.

[0235] The term “isolated” means altered or removed from the natural state. For example, a nucleic acid or a peptide naturally present in a living animal is not “isolated,” but the same nucleic acid or peptide partially or completely separated from the coexisting materials of its natural state is “isolated.” An isolated nucleic acid or protein can exist in substantially purified form, or can exist in a non-native environment such as, for example, a host cell.

[0236] The term “operably linked” or “transcriptional control” refers to functional linkage between a regulatory sequence and a heterologous nucleic acid sequence resulting in expression of the latter. For example, a first nucleic acid sequence is operably linked with a second nucleic acid sequence when the first nucleic acid sequence is placed in a functional relationship with the second nucleic acid sequence. For instance, a promoter is operably linked to a coding sequence if the promoter affects the transcription or expression of the coding sequence. Operably linked DNA sequences can be contiguous with each other and, e.g., where necessary to join two protein coding regions, are in the same reading frame.

[0237] The term “parenteral” administration of an immunogenic composition includes, e.g., subcutaneous (s.c.), intravenous (i.v.), intramuscular (i.m.), or infrasternal injection, intratumoral, or infusion techniques.

[0238] The term “nucleic acid” or “polynucleotide” refers to deoxyribonucleic acids (DNA) or ribonucleic acids (RNA) and polymers thereof in either single- or double-stranded form. Unless specifically limited, the term encompasses nucleic acids containing known analogues of natural nucleotides that have similar binding properties as the reference nucleic acid and are metabolized in a manner similar to naturally occurring nucleotides. Unless otherwise indicated, a particular nucleic acid sequence also implicitly encompasses conservatively modified variants thereof (e.g., degenerate codon substitutions), alleles, orthologs, SNPs, and complementary sequences as well as the sequence explicitly indicated. Specifically, degenerate codon substitutions may be achieved by generating sequences in which the third position of one or more selected (or all) codons is substituted with mixed-base and/or deoxyinosine residues (Batzer et al., Nucleic Acid Res. 19:5081 (1991); Ohtsuka et al., J. Biol. Chem. 260:2605-2608 (1985); and Rossolini et al., Mol. Cell. Probes 8:91-98 (1994)).

[0239] The terms “peptide,” “polypeptide,” and “protein” are used interchangeably, and refer to a compound comprised of amino acid residues covalently linked by peptide bonds. A protein or peptide must contain at least two amino acids, and no limitation is placed on the maximum number of amino acids that can comprise a protein's or peptide's sequence. Polypeptides include any peptide or protein comprising two or more amino acids joined to each other by peptide bonds. As used herein, the term refers to both short chains, which also commonly are referred to in the art as peptides, oligopeptides and oligomers, for example, and to longer chains, which generally are referred to in the art as proteins, of which there are many types. “Polypeptides” include, for example, biologically active fragments, substantially homologous polypeptides, oligopeptides, homodimers, heterodimers, variants of polypeptides, modified polypeptides, derivatives, analogs, fusion proteins, among others. A polypeptide includes a natural peptide, a recombinant peptide, or a combination thereof.

[0240] The term “promoter” refers to a DNA sequence recognized by the synthetic machinery of the cell, or introduced synthetic machinery, required to initiate the specific transcription of a polynucleotide sequence.

[0241] The term “promoter/regulatory sequence” refers to a nucleic acid sequence which is required for expression of a gene product operably linked to the promoter/regulatory sequence. In some instances, this sequence may be the core promoter sequence and in other instances, this sequence may also include an enhancer sequence and other regulatory elements which are required for expression of the gene product. The promoter/regulatory sequence may, for example, be one which expresses the gene product in a tissue specific manner.

[0242] The term “constitutive” promoter refers to a nucleotide sequence which, when operably linked with a polynucleotide which encodes or specifies a gene product, causes the gene product to be produced in a cell under most or all physiological conditions of the cell.

[0243] The term “inducible” promoter refers to a nucleotide sequence which, when operably linked with a polynucleotide which encodes or specifies a gene product, causes the gene product to be produced in a cell substantially only when an inducer which corresponds to the promoter is present in the cell.

[0244] The term “tissue-specific” promoter refers to a nucleotide sequence which, when operably linked with a polynucleotide encodes or specified by a gene, causes the gene product to be produced in a cell substantially only if the cell is a cell of the tissue type corresponding to the promoter.

[0245] As used herein in connection with a messenger RNA (mRNA), a 5′ cap (also termed an RNA cap, an RNA 7-methylguanosine cap or an RNA m7G cap) is a modified guanine nucleotide that has been added to the “front” or 5′ end of a eukaryotic messenger RNA shortly after the start of transcription. The 5′ cap consists of a terminal group which is linked to the first transcribed nucleotide. Its presence is critical for recognition by the ribosome and protection from RNases. Cap addition is coupled to transcription, and occurs co-transcriptionally, such that each influences the other. Shortly after the start of transcription, the 5′ end of the mRNA being synthesized is bound by a cap-synthesizing complex associated with RNA polymerase. This enzymatic complex catalyzes the chemical reactions that are required for mRNA capping. Synthesis proceeds as a multi-step biochemical reaction. The capping moiety can be modified to modulate functionality of mRNA such as its stability or efficiency of translation.

[0246] As used herein, “in vitro transcribed RNA” refers to RNA, preferably mRNA, that has been synthesized in vitro. Generally, the in vitro transcribed RNA is generated from an in vitro transcription vector. The in vitro transcription vector comprises a template that is used to generate the in vitro transcribed RNA.

[0247] As used herein, a “poly(A)” is a series of adenosines attached by polyadenylation to the mRNA. In the preferred embodiment of a construct for transient expression, the polyA is between 50 and 5000 (SEQ ID NO: 6596), preferably greater than 64, more preferably greater than 100, most preferably greater than 300 or 400. poly(A) sequences can be modified chemically or enzymatically to modulate mRNA functionality such as localization, stability or efficiency of translation.

[0248] As used herein, “polyadenylation” refers to the covalent linkage of a polyadenylyl moiety, or its modified variant, to a messenger RNA molecule. In eukaryotic organisms, most messenger RNA (mRNA) molecules are polyadenylated at the 3′ end. The 3′ poly(A) tail is a long sequence of adenine nucleotides (often several hundred) added to the pre-mRNA through the action of an enzyme, polyadenylate polymerase. In higher eukaryotes, the poly(A) tail is added onto transcripts that contain a specific sequence, the polyadenylation signal. The poly(A) tail and the protein bound to it aid in protecting mRNA from degradation by exonucleases. Polyadenylation is also important for transcription termination, export of the mRNA from the nucleus, and translation. Polyadenylation occurs in the nucleus immediately after transcription of DNA into RNA, but additionally can also occur later in the cytoplasm. After transcription has been terminated, the mRNA chain is cleaved through the action of an endonuclease complex associated with RNA polymerase. The cleavage site is usually characterized by the presence of the base sequence AAUAAA near the cleavage site. After the mRNA has been cleaved, adenosine residues are added to the free 3′ end at the cleavage site.

[0249] As used herein, “transient” refers to expression of a non-integrated transgene for a period of hours, days or weeks, wherein the period of time of expression is less than the period of time for expression of the gene if integrated into the genome or contained within a stable plasmid replicon in the host cell.

[0250] As used herein, the terms “treat”, “treatment” and “treating” refer to the reduction or amelioration of the progression, severity and/or duration of a disorder, e.g., a hemoglobinopathy, or the amelioration of one or more symptoms (preferably, one or more discernible symptoms) of a disorder, e.g., a hemoglobinopathy, resulting from the administration of one or more therapies (e.g., one or more therapeutic agents such as a gRNA molecule, CRISPR system, or modified cell of the invention). In specific embodiments, the terms “treat”, “treatment” and “treating” refer to the amelioration of at least one measurable physical parameter of a hemoglobinopathy disorder, not discernible by the patient. In other embodiments the terms “treat”, “treatment” and “treating” refer to the inhibition of the progression of a disorder, either physically by, e.g., stabilization of a discernible symptom, physiologically by, e.g., stabilization of a physical parameter, or both. In other embodiments the terms “treat”, “treatment” and “treating” refer to the reduction or stabilization of a symptom of a hemoglobinopathy, e.g., sickle cell disease or beta-thalassemia.

[0251] The term “signal transduction pathway” refers to the biochemical relationship between a variety of signal transduction molecules that play a role in the transmission of a signal from one portion of a cell to another portion of a cell. The phrase “cell surface receptor” includes molecules and complexes of molecules capable of receiving a signal and transmitting signal across the membrane of a cell.

[0252] The term “subject” is intended to include living organisms in which an immune response can be elicited (e.g., mammals, human).

[0253] The term, a “substantially purified” cell refers to a cell that is essentially free of other cell types. A substantially purified cell also refers to a cell which has been separated from other cell types with which it is normally associated in its naturally occurring state. In some instances, a population of substantially purified cells refers to a homogenous population of cells. In other instances, this term refers simply to cell that have been separated from the cells with which they are naturally associated in their natural state. In some aspects, the cells are cultured in vitro. In other aspects, the cells are not cultured in vitro.

[0254] The term “therapeutic” as used herein means a treatment. A therapeutic effect is obtained by reduction, suppression, remission, or eradication of a disease state.

[0255] The term “prophylaxis” as used herein means the prevention of or protective treatment for a disease or disease state.

[0256] The term “transfected” or “transformed” or “transduced” refers to a process by which exogenous nucleic acid and/or protein is transferred or introduced into the host cell. A “transfected” or “transformed” or “transduced” cell is one which has been transfected, transformed or transduced with exogenous nucleic acid and/or protein. The cell includes the primary subject cell and its progeny.

[0257] The term “specifically binds,” refers to a molecule recognizing and binding with a binding partner (e.g., a protein or nucleic acid) present in a sample, but which molecule does not substantially recognize or bind other molecules in the sample.

[0258] The term “bioequivalent” refers to an amount of an agent other than the reference compound, required to produce an effect equivalent to the effect produced by the reference dose or reference amount of the reference compound.

[0259] “Refractory” as used herein refers to a disease, e.g., a hemoglobinopathy, that does not respond to a treatment. In embodiments, a refractory hemoglobinopathy can be resistant to a treatment before or at the beginning of the treatment. In other embodiments, the refractory hemoglobinopathy can become resistant during a treatment. A refractory hemoglobinopathy is also called a resistant hemoglobinopathy.

[0260] “Relapsed” as used herein refers to the return of a disease (e.g., hemoglobinopathy) or the signs and symptoms of a disease such as a hemoglobinopathy after a period of improvement, e.g., after prior treatment of a therapy, e.g., hemoglobinopathy therapy.

[0261] Ranges: throughout this disclosure, various aspects of the invention can be presented in a range format. It should be understood that the description in range format is merely for convenience and brevity and should not be construed as an inflexible limitation on the scope of the invention. Accordingly, the description of a range should be considered to have specifically disclosed all the possible subranges as well as individual numerical values within that range. For example, description of a range such as from 1 to 6 should be considered to have specifically disclosed subranges such as from 1 to 3, from 1 to 4, from 1 to 5, from 2 to 4, from 2 to 6, from 3 to 6 etc., as well as individual numbers within that range, for example, 1, 2, 2.7, 3, 4, 5, 5.3, and 6. As another example, a range such as 95-99% identity, includes something with 95%, 96%, 97%, 98% or 99% identity, and includes subranges such as 96-99%, 96-98%, 96-97%, 97-99%, 97-98% and 98-99% identity. This applies regardless of the breadth of the range.

[0262] The term “BCL11a” refers to B-cell lymphoma/leukemia 11A, a RNA polymerase II core promoter proximal region sequence-specific DNA binding protein, and the gene encoding said protein, together with all introns and exons. This gene encodes a C2H2 type zinc-finger protein. BCL11A has been found to play a role in the suppression of fetal hemoglobin production. BCL11a is also known as B-Cell CLL/Lymphoma 11A (Zinc Finger Protein), CTIP1, EVI9, Ecotropic Viral Integration Site 9 Protein Homolog, COUP-TF-Interacting Protein 1, Zinc Finger Protein 856, KIAA1809, BCL-11A, ZNF856, EVI-9, and B-Cell CLL/Lymphoma 11A. The term encompasses all isoforms and splice variants of BLC11a. The human gene encoding BCL11a is mapped to chromosomal location 2p16.1 (by Ensembl). The human and murine amino acid and nucleic acid sequences can be found in a public database, such as GenBank, UniProt and Swiss-Prot., and the genomic sequence of human BCL11a can be found in GenBank at NC_000002.12. The BCL11a gene refers to this genomic location, including all introns and exons. There are multiple known isotypes of BCL11a.

[0263] The sequence of mRNA encoding isoform 1 of human BCL11a can be found at NM_022893.

[0264] The peptide sequence of isoform 1 of human BCL11a is:

```
                10 20 30 40
MSRRKQGKPQ HLSKREFSPE PLEAILTDDE PDHGPLGAPE
                50 60 70 80
GDHDLLTCGQ CQMNFPLGDI LIFIEHKRKQ CNGSLCLEKA
                90 100 110 120
VDKPPSPSPI EMKKASNPVE VGIQVTPEDD DCLSTSSRGI
              130 140 150 160
CPKQEHIADK LLHWRGLSSP RSAHGALIPT PGMSAEYAPQ
              170 180 190 200
GICKDEPSSY TCTTCKQPFT SAWFLLQHAQ NTHGLRIYLE
              210 220 230 240
SEHGSPLTPR VGIPSGLGAE CPSQPPLHGI HIADNNPFNL
              250 260 270 280
LRIPGSVSRE ASGLAEGRFP PTPPLFSPPP RHHLDPHRIE
              290 300 310 320
RLGAEEMALA THHPSAFDRV LRLNPMAMEP PAMDFSRRLR
              330 340 350 360
ELAGNTSSPP LSPGRPSPMQ RLLQPFQPGS KPPFLATPPL
              370 380 390 400
PPLQSAPPPS QPPVKSKSCE FCGKTFKFQS NLVVHRRSHT
              410 420 430 440
GEKPYKCNLC DHACTQASKL KRHMKTHMHK SSPMTVKSDD
              450 460 470 480
GLSTASSPEP GTSDLVGSAS SALKSVVAKF KSENDPNLIP
              490 500 510 520
ENGDEEEEED DEEEEEEEEE EEEELTESER VDYGFGLSLE
              530 540 550 560
AARHHENSSR GAVVGVGDES RALPDVMQGM VLSSMQHFSE
              570 580 590 600
AFHQVLGEKH KRGHLAEAEG HRDTCDEDSV AGESDRIDDG
              610 620 630 640
TVNGRGCSPG ESASGGLSKK LLLGSPSSLS PFSKRIKLEK
              650 660 670 680
EFDLPPAAMP NTENVYSQWL AGYAASRQLK DPFLSFGDSR
              690 700 710 720
QSPFASSSEH SSENGSLRFS TPPGELDGGI SGRSGTGSGG
              730 740 750 760
STPHISGPGP GRPSSKEGRR SDTCEYCGKV FKNCSNLTVH
              770 780 790 800
RRSHTGERPY KCELCNYACA QSSKLTRHMK THGQVGKDVY
              810 820 830
KCEICKMPFS VYSTLEKHMK KWHSDRVLNN DIKTE
```

[0265] SEQ ID NO: 21-1 (Identifier Q9H165-1; and NM_022893.3; and accession ADL14508.1).

[0266] The sequences of other BCL11a protein isoforms are provided at:

### Isoform 2: Q9H165-2

### Isoform 3: Q9H165-3

### Isoform 4: Q9H165-4

### Isoform 5: Q9H165-5

### Isoform 6: Q9H165-6

[0267] As used herein, a human BCL11a protein also encompasses proteins that have over its full length at least about 70%, 71%, 72%, 73%, 74%, 75%, 76%, 77%, 78%, 79%, 80%, 81%, 82%, 83%, 84%, 85%, 86%, 87%, 88%, 89%, 90%, 91%, 92%, 93%, 94%, 95%, 96%, 97%, 98%, 99% or 100% sequence identity with BCL11a isolorm 1-6, wherein such proteins still have at least one of the functions of BCL11a.

[0268] The term “globin locus” as used herein refers to the region of human chromosome 11 comprising genes for embryonic (ε), fetal (G(γ) and A(γ)), adult globin genes (γ and β), locus control regions and DNase I hypersensitivity sites.

[0269] The term “complementary” as used in connection with nucleic acid, refers to the pairing of bases, A with T or U, and G with C. The term complementary refers to nucleic acid molecules that are completely complementary, that is, form A to T or U pairs and G to C pairs across the entire reference sequence, as well as molecules that are at least 80%, 85%, 90%, 95%, 99% complementary.

[0270] The term “HPFH” refers to hereditary persistence of fetal hemoglobin, and is characterized in increased fetal hemoglobin in adult red blood cells. The term “HPFH region” refers to a genomic site which, when modified (e.g., mutated or deleted), causes increased HbF production in adult red blood cells, and includes HPFH sites identified in the literature (see e.g., the Online Mendelian Inheritance in Man: http://www.omim.org/entry/141749). In an exemplary embodiment, the HPFH region is a region within or encompassing the beta globin gene cluster on chromosome 11p15. In an exemplary embodiment, the HPFH region is within or emcompasses at least part of the delta globin gene. In an exemplary embodiment, the HPFH region is a region of the promoter of HBG1. In an exemplary embodiment, the HPFH region is a region of the promoter of HBG1. In an exemplary embodiment, the HPFH region is a region described in Sankaran V G et al. NEJM (2011) 365:807-814. In an exemplary embodiment, the HPFH region is the French breakpoint deletional HPFH as described in Sankaran V G et al. NEJM (2011) 365:807-814. In an exemplary embodiment, the HPFH region is the Algerian HPFH as described in Sankaran V G et al. NEJM (2011) 365:807-814. In an exemplary embodiment, the HPFH region is the Sri Lankan HPFH as described in Sankaran V G et al. NEJM (2011) 365:807-814. In an exemplary embodiment, the HPFH region is the HPFH-3 as described in Sankaran V G et al. NEJM (2011) 365:807-814. In an exemplary embodiment, the HPFH region is the HPFH-2 as described in Sankaran V G et al. NEJM (2011) 365:807-814. In an embodiment, the HPFH-1 region is the HPFH-3 as described in Sankaran V G et al. NEJM (2011) 365:807-814. In an exemplary embodiment, the HPFH region is the Sri Lankan (δβ)⁰-thalassemia HPFH as described in Sankaran V G et al. NEJM (2011) 365:807-814. In an exemplary embodiment, the HPFH region is the Sicilian (δβ)⁰-thalassemia HPFH as described in Sankaran V G et al. NEJM (2011) 365:807-814. In an exemplary embodiment, the HPFH region is the Macedonian (δβ)⁰-thalassemia HPFH as described in Sankaran V G et al. NEJM (2011) 365:807-814. In an exemplary embodiment, the HPFH region is the Kurdish β⁰-thalassemia HPFH as described in Sankaran V G et al. NEJM (2011) 365:807-814. In an exemplary embodiment, the HPFH region is the region located at Chr11:5213874-5214400 (hg18). In an exemplary embodiment, the HPFH region is the region located at Chr11:5215943-5215046 (hg18). In an exemplary embodiment, the HPFH region is the region located at Chr11:5234390-5238486 (hg38).

[0271] “BCL11a enhancer” as the term is used herein, refers to nucleic acid sequence which affects, e.g., enhances, expression or function of BCL11a. See e.g., Bauer et al., Science, vol. 342, 2013, pp. 253-257. The BCL11a enhancer may be, for example, operative only in certain cell types, for example, cells of the erythroid lineage. One example of a BCL11a enhancer is the nucleic acid sequence between exon 2 and exon 3 of the BCL11a gene gene (e.g., the nucleic acid at or corresponding to positions +55: Chr2:60497676-60498941; +58: Chr2:60494251-60495546; +62: Chr2:60490409-60491734 as recorded in hg38). In an embodiment, the BCL11a Enhancer is the +62 region of the nucleic acid sequence between exon 2 and exon 3 of the BCL11a gene. In an embodiment, the BCL11a Enhancer is the +58 region of the nucleic acid sequence between exon 2 and exon 3 of the BCL11a gene. In an embodiment, the BCL11a Enhancer is the +55 region of the nucleic acid sequence between exon 2 and exon 3 of the BCL11a gene.

[0272] The terms “hematopoietic stem and progenitor cell” or “HSPC” are used interchangeably, and refer to a population of cells comprising both hematopoietic stem cells (“HSCs”) and hematopoietic progenitor cells (“HPCs”). Such cells are characterized, for example, as CD34+. In exemplary embodiments, HSPCs are isolated from bone marrow. In other exemplary embodiments, HSPCs are isolated from peripheral blood. In other exemplary embodiments, HSPCs are isolated from umbilical cord blood.

[0273] “Stem cell expander” as used herein refers to a compound which causes cells, e.g., HSPCs, HSCs and/or HPCs to proliferate, e.g., increase in number, at a faster rate relative to the same cell types absent said agent. In one exemplary aspect, the stem cell expander is an inhibitor of the aryl hydrocarbon receptor pathway. Additional examples of stem cell expanders are provided below. In embodiments, the proliferation, e.g., increase in number, is accomplished ex vivo.

[0274] “Engraftment” or “engraft” refers to the incorporation of a cell or tissue, e.g., a population of HSPCs, into the body of a recipient, e.g., a mammal or human subject. In one example, engraftment includes the growth, expansion and/or differention of the engrafted cells in the recipient. In an example, engraftment of HSPCs includes the differentiation and growth of said HSPCs into erythroid cells within the body of the recipient.

[0275] The term “Hematopoietic progenitor cells” (HPCs) as used herein refers to primitive hematopoietic cells that have a limited capacity for self-renewal and the potential for multilineage differentiation (e.g., myeloid, lymphoid), mono-lineage differentiation (e.g., myeloid or lymphoid) or cell-type restricted differentiation (e.g., erythroid progenitor) depending on placement within the hematopoietic hierarchy (Doulatov et al., Cell Stem Cell 2012).

[0276] “Hematopoietic stem cells” (HSCs) as used herein refer to immature blood cells having the capacity to self-renew and to differentiate into more mature blood cells comprising granulocytes (e.g., promyelocytes, neutrophils, eosinophils, basophils), erythrocytes (e.g., reticulocytes, erythrocytes), thrombocytes (e.g., megakaryoblasts, platelet producing megakaryocytes, platelets), and monocytes (e.g., monocytes, macrophages). HSCs are interchangeably described as stem cells throughout the specification. It is known in the art that such cells may or may not include CD34+ cells. CD34+ cells are immature cells that express the CD34 cell surface marker. CD34+ cells are believed to include a subpopulation of cells with the stem cell properties defined above. It is well known in the art that HSCs are multipotent cells that can give rise to primitive progenitor cells (e.g., multipotent progenitor cells) and/or progenitor cells committed to specific hematopoietic lineages (e.g., lymphoid progenitor cells). The stem cells committed to specific hematopoietic lineages may be of T cell lineage, B cell lineage, dendritic cell lineage, Langerhans cell lineage and/or lymphoid tissue-specific macrophage cell lineage. In addition, HSCs also refer to long term HSC (LT-HSC) and short term HSC (ST-HSC). ST-HSCs are more active and more proliferative than LT-HSCs. However, LT-HSC have unlimited self renewal (i.e., they survive throughout adulthood), whereas ST-HSC have limited self renewal (i.e., they survive for only a limited period of time). Any of these HSCs can be used in any of the methods described herein. Optionally, ST-HSCs are useful because they are highly proliferative and thus, quickly increase the number of HSCs and their progeny. Hematopoietic stem cells are optionally obtained from blood products. A blood product includes a product obtained from the body or an organ of the body containing cells of hematopoietic origin. Such sources include un-fractionated bone marrow, umbilical cord, peripheral blood (e.g., mobilized peripheral blood, e.g., moblized with a mobilization agent such as G-CSF or Plerixafor® (AMD3100)), liver, thymus, lymph and spleen. All of the aforementioned crude or un-fractionated blood products can be enriched for cells having hematopoietic stem cell characteristics in ways known to those of skill in the art. In an embodiment, HSCs are characterized as CD34+/CD38−/CD90+/CD45RA−. In embodiments, the HSC s are characterized as CD34+/CD90+/CD49f+ cells.

[0277] “Expansion” or “Expand” in the context of cells refers to an increase in the number of a characteristic cell type, or cell types, from an initial cell population of cells, which may or may not be identical. The initial cells used for expansion may not be the same as the cells generated from expansion.

[0278] “Cell population” refers to eukaryotic mammalian, preferably human, cells isolated from biological sources, for example, blood product or tissues and derived from more than one cell.

[0279] “Enriched” when used in the context of cell population refers to a cell population selected based on the presence of one or more markers, for example, CD34+.

[0280] The term “CD34+ cells” refers to cells that express at their surface CD34 marker. CD34+ cells can be detected and counted using for example flow cytometry and fluorescently labeled anti-CD34 antibodies.

[0281] “Enriched in CD34+ cells” means that a cell population has been selected based on the presence of CD34 marker. Accordingly, the percentage of CD34+ cells in the cell population after selection method is higher than the percentage of CD34+ cells in the initial cell population before selecting step based on CD34 markers. For example, CD34+ cells may represent at least 50%, 60%, 70%, 80% or at least 90% of the cells in a cell population enriched in CD34+ cells.

[0282] The terms “F cell” and “F-cell” refer to cells, usually erythrocytes (e.g., red blood cells) which contain and/or produce (e.g., express) fetal hemoglobin. For example, an F-cell is a cell that contains or produces detectible levels of fetal hemoglobin. For example, an F-cell is a cell that contains or produces at least 5 picograms of fetal hemoglobin. In another example, an F-cell is a cell that contains or produces at least 6 picograms of fetal hemoglobin. In another example, an F-cell is a cell that contains or produces at least 7 picograms of fetal hemoglobin. In another example, an F-cell is a cell that contains or produces at least 8 picograms of fetal hemoglobin. In another example, an F-cell is a cell that contains or produces at least 9 picograms of fetal hemoglobin. In another example, an F-cell is a cell that contains or produces at least 10 picograms of fetal hemoglobin. Levels of fetal hemoglobin may be measured using an assay described herein or by other method known in the art, for example, flow cytometry using an anti-fetal hemoglobin detection reagent, high performance liquid chromatography, mass spectrometry, or enzyme-linked immunoabsorbent assay.

[0283] Unless otherwise stated, all genome or chromosome coordinates are are according to hg38.

### DETAILED DESCRIPTION

[0284] The gRNA molecules, compositions and methods described herein relate to genome editing in eukaryotic cells using the CRISPR/Cas9 system. In particular, the gRNA molecules, compositions and methods described herein relate to regulation of globin levels and are useful, for example, in regulating expression and production of globin genes and protein. The gRNA molecules, compositions and methods can be useful in the treatment of hemoglobinopathies.

### I. 2RNA Molecules

[0285] A gRNA molecule may have a number of domains, as described more fully below, however, a gRNA molecule typically comprises at least a crRNA domain (comprising a targeting domain) and a tracr. The gRNA molecules of the invention, used as a component of a CRISPR system, are useful for modifying (e.g., modifying the sequence) DNA at or near a target site. Such modifications include deletions and or insertions that result in, for example, reduced or eliminated expression of a functional product of the gene comprising the target site. These uses, and additional uses, are described more fully below.

[0286] In an embodiment, a unimolecular, or sgRNA comprises, preferably from 5′ to 3′: a crRNA (which contains a targeting domain complementary to a target sequence and a region that forms part of a flagpole (i.e., a crRNA flagpole region)); a loop; and a tracr (which contains a domain complementary to the crRNA flagpole region, and a domain which additionally binds a nuclease or other effector molecule, e.g., a Cas molecule, e.g., aCas9 molecule), and may take the following format (from 5′ to 3′):

[targeting domain]-[crRNA flagpole region]-[optional first flagpole extension]-[loop]-[optional first tracr extension]-[tracr flagpole region]-[tracr nuclease binding domain]

[0287] In embodiments, the tracr nuclease binding domain binds to a Cas protein, e.g., a Cas9 protein.

[0288] In an embodiment, a bimolecular, or dgRNA comprises two polynucleotides; the first, preferably from 5′ to 3′: a crRNA (which contains a targeting domain complementary to a target sequence and a region that forms part of a flagpole; and the second, preferrably from 5′ to 3′: a tracr (which contains a domain complementary to the crRNA flagpole region, and a domain which additionally binds a nuclease or other effector molecule, e.g., a Cas molecule, e.g., Cas9 molecule), and may take the following format (from 5′ to 3′):

Polynucleotide 1 (crRNA): [targeting domain]-[crRNA flagpole region]-[optional first flagpole extension]-[optional second flagpole extension]
Polynucleotide 2 (tracr): [optional first tracr extension]-[tracr flagpole region]-[tracr nuclease binding domain]

[0289] In embodiments, the tracr nuclease binding domain binds to a Cas protein, e.g., a Cas9 protein.

[0290] In some aspects, the targeting domain comprises or consists of a targeting domain sequence described herein, e.g., a targeting domain described in Table 1, 2, 3, 4, 5, or 6, or a targeting domain comprising or consisting of 17, 18, 19, 20, 21, 22, 23, 24, or 25 (preferably 20) consecutive nucleotides of a targeting domain sequence described in Table 1, 2, 3, 4, 5, or 6.

[0291] In some aspects, the flagpole, e.g., the crRNA flagpole region, comprises, from 5′ to 3′: GUUUUAGAGCUA (SEQ ID NO: 6584).

[0292] In some aspects, the flagpole, e.g., the crRNA flagpole region, comprises, from 5′ to 3′: GUUUAAGAGCUA (SEQ ID NO: 6585).

[0293] In some aspects the loop comprises, from 5′ to 3′: GAAA (SEQ ID NO: 6588).

[0294] In some aspects the tracr comprises, from 5′ to 3′: UAGCAAGUUAAAAUAAGGCUAGUCCGUUAUCAACUUGAAAAAGUGGCACCGAGUCGG UGC (SEQ ID NO: 6589) and is preferably used in a gRNA molecule comprising SEQ ID NO 6584.

[0295] In some aspects the tracr comprises, from 5′ to 3′: UAGCAAGUUUAAAUAAGGCUAGUCCGUUAUCAACUUGAAAAAGUGGCACCGAGUCGG UGC (SEQ ID NO: 6590) and is preferably used in a gRNA molecule comprising SEQ ID NO 6585.

[0296] In some aspects, the gRNA may also comprise, at the 3′ end, additional U nucleic acids. For example the gRNA may comprise an additional 1, 2, 3, 4, 5, 6, 7, 8, 9, or 10 U nucleic acids at the 3′ end. In an embodiment, the gRNA comprises an additional 4 U nucleic acids at the 3′ end. In the case of dgRNA, one or more of the polynucleotides of the dgRNA (e.g., the polynucleotide comprising the targeting domain and the polynucleotide comprising the tracr) may comprise, at the 3′ end, additional U nucleic acids. For example, the case of dgRNA, one or more of the polynucleotides of the dgRNA (e.g., the polynucleotide comprising the targeting domain and the polynucleotide comprising the tracr) may comprise an additional 1, 2, 3, 4, 5, 6, 7, 8, 9, or 10 U nucleic acids at the 3′ end. In an embodiment, in the case of dgRNA, one or more of the polynucleotides of the dgRNA (e.g., the polynucleotide comprising the targeting domain and the polynucleotide comprising the tracr) comprises an additional 4 U nucleic acids at the 3′ end. In an embodiment of a dgRNA, only the polynucleotide comprising the tracr comprises the additional U nucleic acid(s), e.g., 4 U nucleic acids. In an embodiment of a dgRNA, only the polynucleotide comprising the targeting domain comprises the additional U nucleic acid(s). In an embodiment of a dgRNA, both the polynucleotide comprising the targeting domain and the polynucleotide comprising the tracr comprise the additional U nucleic acids, e.g., 4 U nucleic acids.

[0297] In some aspects, the gRNA may also comprise, at the 3′ end, additional A nucleic acids. For example the gRNA may comprise an additional 1, 2, 3, 4, 5, 6, 7, 8, 9, or 10 A nucleic acids at the 3′ end. In an embodiment, the gRNA comprises an additional 4 A nucleic acids at the 3′ end. In the case of dgRNA, one or more of the polynucleotides of the dgRNA (e.g., the polynucleotide comprising the targeting domain and the polynucleotide comprising the tracr) may comprise, at the 3′ end, additional A nucleic acids. For example, the case of dgRNA, one or more of the polynucleotides of the dgRNA (e.g., the polynucleotide comprising the targeting domain and the polynucleotide comprising the tracr) may comprise an additional 1, 2, 3, 4, 5, 6, 7, 8, 9, or 10 A nucleic acids at the 3′ end. In an embodiment, in the case of dgRNA, one or more of the polynucleotides of the dgRNA (e.g., the polynucleotide comprising the targeting domain and the polynucleotide comprising the tracr) comprises an additional 4 A nucleic acids at the 3′ end. In an embodiment of a dgRNA, only the polynucleotide comprising the tracr comprises the additional A nucleic acid(s), e.g., 4 A nucleic acids. In an embodiment of a dgRNA, only the polynucleotide comprising the targeting domain comprises the additional A nucleic acid(s). In an embodiment of a dgRNA, both the polynucleotide comprising the targeting domain and the polynucleotide comprising the tracr comprise the additional U nucleic acids, e.g., 4 A nucleic acids.

[0298] In embodiments, one or more of the polynucleotides of the gRNA molecule may comprise a cap at the 5′ end.

[0299] In an embodiment, a unimolecular, or sgRNA comprises, preferably from 5′ to 3′: a crRNA (which contains a targeting domain complementary to a target sequence; a crRNA flagpole region; first flagpole extension; a loop; a first tracr extension (which contains a domain complementary to at least a portion of the first flagpole extension); and a tracr (which contains a domain complementary to the crRNA flagpole region, and a domain which additionally binds a Cas9 molecule). In some aspects, the targeting domain comprises a targeting domain sequence described herein, e.g., a targeting domain described in Table 1, 2, 3, 4, 5, or 6, or a targeting domain comprising or consisting of 17, 18, 19, 20, 21, 22, 23, 24, or 25 (preferably 20) consecutive nucleotides of a targeting domain sequence described in Table 1, 2, 3, 4, 5, or 6, for example the 3′ 17, 18, 19, 20, 21, 22, 23, 24 or 25 (preferably 20) consecutive nucleotides of a targeting domain sequence described in Table 1, 2, 3, 4, 5, or 6.

[0300] In aspects comprising a first flagpole extension and/or a first tracr extension, the flagpole, loop and tracr sequences may be as described above. In general any first flagpole extension and first tracr extension may be employed, provided that they are complementary. In embodiments, the first flagpole extension and first tracr extension consist of 3, 4, 5, 6, 7, 8, 9, 10 or more complementary nucleotides.

[0301] In some aspects, the first flagpole extension comprises, from 5′ to 3′: UGCUG (SEQ ID NO: 6586). In some aspects, the first flagpole extension consists of SEQ ID NO: 6586.

[0302] In some aspects, the first tracr extension comprises, from 5′ to 3′: CAGCA (SEQ ID NO: 6591). In some aspects, the first tracr extension consists of SEQ ID NO: 6591.

[0303] In an embodiment, a dgRNA comprises two nucleic acid molecules. In some aspects, the dgRNA comprises a first nucleic acid which contains, preferably from 5′ to 3′: a targeting domain complementary to a target sequence; a crRNA flagpole region; optionally a first flagpole extension; and, optionally, a second flagpole extension; and a second nucleic acid (which may be referred to herein as a tracr), and comprises at least a domain which binds a Cas molecule, e.g., a Cas9 molecule) comprising preferably from 5′ to 3′: optionally a first tracr extension; and a tracr (which contains a domain complementary to the crRNA flagpole region, and a domain which additionally binds a Cas, e.g., Cas9, molecule). The second nucleic acid may additionally comprise, at the 3′ end (e.g., 3′ to the tracr) additional U nucleic acids. For example the tracr may comprise an additional 1, 2, 3, 4, 5, 6, 7, 8, 9, or 10 U nucleic acids at the 3′ end (e.g., 3′ to the tracr). The second nucleic acid may additionally or alternately comprise, at the 3′ end (e.g., 3′ to the tracr) additional A nucleic acids. For example the tracr may comprise an additional 1, 2, 3, 4, 5, 6, 7, 8, 9, or 10 A nucleic acids at the 3′ end (e.g., 3′ to the tracr). In some aspects, the targeting domain comprises a targeting domain sequence described herein, e.g., a targeting domain described in Table 1, 2, 3, 4, 5, or 6, or a targeting domain comprising or consisting of 17, 18, 19, 20, 21, 22, 23, 24, or 25 (preferably 20) consecutive nucleotides of a targeting domain sequence described in Table 1, 2, 3, 4, 5, or 6.

[0304] In aspects involving a dgRNA, the crRNA flagpole region, optional first flagpole extension, optional first tracr extension and tracr sequences may be as described above.

[0305] In some aspects, the optional second flagpole extension comprises, from 5′ to 3′: UUUUG (SEQ ID NO: 6587).

[0306] In embodiments, the 3′ 1, 2, 3, 4, or 5 nucleotides, the 5′ 1, 2, 3, 4, or 5 nucleotides, or both the 3′ and 5′ 1, 2, 3, 4, or 5 nucleotides of the gRNA molecule (and in the case of a dgRNA molecule, the polynucleotide comprising the targeting domain and/or the polynucleotide comprising the tracr) are modified nucleic acids, as described more fully in section XIII, below.

[0307] The domains are discussed briefly below:

### 1) The Targeting Domain:

[0308] Guidance on the selection of targeting domains can be found, e.g., in Fu Y el al. NAT BIOTECHNOL 2014 (doi: 10.1038/nbt.2808) and Sternberg S H el al. NATURE 2014 (doi: 10.1038/nature13011).

[0309] The targeting domain comprises a nucleotide sequence that is complementary, e.g., at least 80, 85, 90, 95, or 99% complementary, e.g., fully complementary, to the target sequence on the target nucleic acid. The targeting domain is part of an RNA molecule and will therefore comprise the base uracil (U), while any DNA encoding the gRNA molecule will comprise the base thymine (T). While not wishing to be bound by theory, it is believed that the complementarity of the targeting domain with the target sequence contributes to specificity of the interaction of the gRNA molecule/Cas9 molecule complex with a target nucleic acid. It is understood that in a targeting domain and target sequence pair, the uracil bases in the targeting domain will pair with the adenine bases in the target sequence.

[0310] In an embodiment, the targeting domain is 5 to 50, e.g., 10 to 40, e.g., 10 to 30, e.g., 15 to 30, e.g., 15 to 25 nucleotides in length. In an embodiment, the targeting domain is 15, 16, 17, 18, 19, 20, 21, 22, 23, 24 or 25 nucleotides in length. In an embodiment, the targeting domain is 16 nucleotides in length. In an embodiment, the targeting domain is 17 nucleotides in length. In an embodiment, the targeting domain is 18 nucleotides in length. In an embodiment, the targeting domain is 19 nucleotides in length. In an embodiment, the targeting domain is 20 nucleotides in length. In an embodiment, the targeting domain is 21 nucleotides in length. In an embodiment, the targeting domain is 22 nucleotides in length. In an embodiment, the targeting domain is 23 nucleotides in length. In an embodiment, the targeting domain is 24 nucleotides in length. In an embodiment, the targeting domain is 25 nucleotides in length. In embodiments, the aforementioned 16, 17, 18, 19, 20, 21, 22, 23, 24, or 25 nucleotides comprise the 5′-16, 17, 18, 19, 20, 21, 22, 23, 24, or 25 nucleotides from a targeting domain described in Table 1, 2, 3, 4, 5, or 6. In embodiments, the aforementioned 16, 17, 18, 19, 20, 21, 22, 23, 24, or 25 nucleotides comprise the 3′-16, 17, 18, 19, 20, 21, 22, 23, 24, or 25 nucleotides from a targeting domain described in Table 1, 2, 3, 4, 5, or 6.

[0311] Without being bound by theory, it is believed that the 8, 9, 10, 11 or 12 nucleic acids of the targeting domain disposed at the 3′ end of the targeting domain is important for targeting the target sequence, and may thus be referred to as the “core” region of the targeting domain. In an embodiment, the core domain is fully complementary with the target sequence.

[0312] The strand of the target nucleic acid with which the targeting domain is complementary is referred to herein as the target sequence. In some aspects, the target sequence is disposed on a chromosome, e.g., is a target within a gene. In some aspects the target sequence is disposed within an exon of a gene. In some aspects the target sequence is disposed within an intron of a gene. In some aspects, the target sequence comprises, or is proximal (e.g., within 10, 20, 30, 40, 50, 100, 200, 300, 400, 500, or 1000 nucleic acids) to a binding site of a regulatory element, e.g., a promoter or transcription factor binding site, of a gene of interest. Some or all of the nucleotides of the domain can have a modification, e.g., modification found in Section XIII herein.

2) crRNA Flagpole Region:

[0313] The flagpole contains portions from both the crRNA and the tracr. The crRNA flagpole region is complementary with a portion of the tracr, and in an embodiment, has sufficient complementarity to a portion of the tracr to form a duplexed region under at least some physiological conditions, for example, normal physiological conditions. In an embodiment, the crRNA flagpole region is 5 to 30 nucleotides in length. In an embodiment, the crRNA flagpole region is 5 to 25 nucleotides in length. The crRNA flagpole region can share homology with, or be derived from, a naturally occurring portion of the repeat sequence from a bacterial CRISPR array. In an embodiment, it has at least 50% homology with a crRNA flagpole region disclosed herein, e.g., an S. pyogenes, or S. thermophilus, crRNA flagpole region.

[0314] In an embodiment, the flagpole, e.g., the crRNA flagpole region, comprises SEQ ID NO: 6584. In an embodiment, the flagpole, e.g., the crRNA flagpole region, comprises sequence having at least 50%, 60%, 70%, 80%, 85%, 90%, 95% or 99% homology with SEQ ID NO: 6584. In an embodiment, the flagpole, e.g., the crRNA flagpole region, comprises at least 5, 6, 7, 8, 9, 10, or 11 nucleotides of SEQ ID NO: 6584. In an embodiment, the flagpole, e.g., the crRNA flagpole region, comprises SEQ ID NO: 6585. In an embodiment, the flagpole comprises sequence having at least 50%, 60%, 70%, 80%, 85%, 90%, 95% or 99% homology with SEQ ID NO: 6585. In an embodiment, the flagpole, e.g., the crRNA flagpole region, comprises at least 5, 6, 7, 8, 9, 10, or 11 nucleotides of SEQ ID NO: 6585.

[0315] Some or all of the nucleotides of the domain can have a modification, e.g., modification described in Section XIII herein.

### 3) First Flagpole Extension

[0316] When a tracr comprising a first tracr extension is used, the crRNA may comprise a first flagpole extension. In general any first flagpole extension and first tracr extension may be employed, provided that they are complementary. In embodiments, the first flagpole extension and first tracr extension consist of 3, 4, 5, 6, 7, 8, 9, 10 or more complementary nucleotides.

[0317] The first flagpole extension may comprise nucleotides that are complementary, e.g., 80%, 85%, 90%, 95% or 99%, e.g., fully complementary, with nucleotides of the first tracr extension. In some aspects, the first flagpole extension nucleotides that hybridize with complementary nucleotides of the first tracr extension are contiguous. In some aspects, the first flagpole extension nucleotides that hybridize with complementary nucleotides of the first tracr extension are discontinuous, e.g., comprises two or more regions of hybridization separated by nucleotides that do not base pair with nucleotides of the first tracr extension. In some aspects, the first flagpole extension comprises at least 2, 3, 4, 5, 6, 7, 8, 9, 10, 11, 12, 13, 14, 15, 16, 17, 18, 19, 20 or more nucleotides. In some aspects, the first flagpole extension comprises, from 5′ to 3′: UGCUG (SEQ ID NO: 6586). In some aspects, the first flagpole extension consists of SEQ ID NO: 6586. In some aspects the first flagpole extension comprises nucleic acid that is at least 80%, 85%, 90%, 95% or 99% homology to SEQ ID NO: 6586.

[0318] Some or all of the nucleotides of the first tracr extension can have a modification, e.g., modification found in Section XIII herein.

### 3) The Loop

[0319] A loop serves to link the crRNA flagpole region (or optionally the first flagpole extension, when present) with the tracr (or optionally the first tracr extension, when present) of a sgRNA. The loop can link the crRNA flagpole region and tracr covalently or non-covalently. In an embodiment, the linkage is covalent. In an embodiment, the loop covalently couples the crRNA flagpole region and tracr. In an embodiment, the loop covalently couples the first flagpole extension and the first tracr extension. In an embodiment, the loop is, or comprises, a covalent bond interposed between the crRNA flagpole region and the domain of the tracr which hybridizes to the crRNA flagpole region. Typically, the loop comprises one or more, e.g., 2, 3, 4, 5, 6, 7, 8, 9, or 10 nucleotides.

[0320] In dgRNA molecules the two molecules can be associated by virtue of the hybridization between at least a portion of the crRNA (e.g., the crRNA flagpole region) and at least a portion of the tracr (e.g., the domain of the tracr which is complementary to the crRNA flagpole region).

[0321] A wide variety of loops are suitable for use in sgRNAs. Loops can consist of a covalent bond, or be as short as one or a few nucleotides, e.g., 1, 2, 3, 4, or 5 nucleotides in length. In an embodiment, a loop is 2, 3, 4, 5, 6, 7, 8, 9, 10, 15, 20, or 25 or more nucleotides in length. In an embodiment, a loop is 2 to 50, 2 to 40, 2 to 30, 2 to 20, 2 to 10, or 2 to 5 nucleotides in length. In an embodiment, a loop shares homology with, or is derived from, a naturally occurring sequence. In an embodiment, the loop has at least 50% homology with a loop disclosed herein. In an embodiment, the loop comprises SEQ ID NO: 6588.

[0322] Some or all of the nucleotides of the domain can have a modification, e.g., modification described in Section XIII herein.

### 4) The Second Flagpole Extension

[0323] In an embodiment, a dgRNA can comprise additional sequence, 3′ to the crRNA flagpole region or, when present, the first flagpole extension, referred to herein as the second flagpole extension. In an embodiment, the second flagpole extension is, 2-10, 2-9, 2-8, 2-7, 2-6, 2-5, or 2-4 nucleotides in length. In an embodiment, the second flagpole extension is 2, 3, 4, 5, 6, 7, 8, 9, or 10 or more nucleotides in length. In an embodiment, the second flagpole extension comprises SEQ ID NO: 6587.

### 5) The Tracr:

[0324] The tracr is the nucleic acid sequence required for nuclease, e.g., Cas9, binding. Without being bound by theory, it is believed that each Cas9 species is associated with a particular tracr sequence. Tracr sequences are utilized in both sgRNA and in dgRNA systems. In an embodiment, the tracr comprises sequence from, or derived from, an S. pyogenes tracr. In some aspects, the tracr has a portion that hybridizes to the flagpole portion of the crRNA, e.g., has sufficient complementarity to the crRNA flagpole region to form a duplexed region under at least some physiological conditions (sometimes referred to herein as the tracr flagpole region or a tracr domain complementary to the crRNA flagpole region). In embodiments, the domain of the tracr that hybridizes with the crRNA flagpole region comprises at least 5, 6, 7, 8, 9, 10, 11, 12, 13, 14, 15, 16, 17, 18, 19, or 20 nucleotides that hybridize with complementary nucleotides of the crRNA flagpole region. In some aspects, the tracr nucleotides that hybridize with complementary nucleotides of the crRNA flagpole region are contiguous. In some aspects, the tracr nucleotides that hybridize with complementary nucleotides of the crRNA flagpole region are discontinuous, e.g., comprises two or more regions of hybridization separated by nucleotides that do not base pair with nucleotides of the crRNA flagpole region. In some aspects, the portion of the tracr that hybridizes to the crRNA flagpole region comprises, from 5′ to 3′: UAGCAAGUUAAAA (SEQ ID NO: 6597). In some aspects, the portion of the tmcr that hybridizes to the crRNA flagpole regioncomprises, from 5′ to 3′: UAGCAAGUUUAAA (SEQ ID NO: 6598). In embodiments, the sequence that hybridizes with the crRNA flagpole region is disposed on the tracr 5′- to the sequence of the tracr that additionally binds a nuclease, e.g., a Cas molecule, e.g., a Cas9 molecule.

[0325] The tracr further comprises a domain that additionally binds to a nuclease, e.g., a Cas molecule, e.g., a Cas9 molecule. Without being bound by theory, it is believed that Cas9 from different species bind to different tracr sequences. In some aspects, the tracr comprises sequence that binds to a S. pyogenes Cas9 molecule. In some aspects, the tracr comprises sequence that binds to a Cas9 molecule disclosed herein. In some aspects, the domain that additionally binds a Cas9 molecule comprises, from 5′ to 3′: UAAGGCUAGUCCGUUAUCAACUUGAAAAAGUGGCACCGAGUCGGUGC (SEQ ID NO: 6599). In some aspects the domain that additionally binds a Cas9 molecule comprises, from 5′ to 3′: UAAGGCUAGUCCGUUAUCAACUUGAAAAAGUGGCACCGAGUCGGUGCUUUU (SEQ ID NO: 6600).

[0326] In some embodiments, the tracr comprises SEQ ID NO: 6589. In some embodiments, the tracr comprises SEQ ID NO: 6590.

[0327] Some or all of the nucleotides of the tracr can have a modification, e.g., modification found in Section XIII herein. In embodiments, the gRNA (e.g., the sgRNA or the tracr and/or crRNA of a dgRNA), e.g., any of the gRNA or gRNA components described above, comprises an inverted abasic residue at the 5′ end, the 3′ end or both the 5′ and 3′ end of the gRNA. In embodiments, the gRNA (e.g., the sgRNA or the tracr and/or crRNA of a dgRNA), e.g., any of the gRNA or gRNA components described above, comprises one or more phosphorothioate bonds between residues at the 5′ end of the polynucleotide, for example, a phosphrothioate bond between the first two 5′ residues, between each of the first three 5′ residues, between each of the first four 5′ residues, or between each of the first five 5′ residues. In embodiments, the gRNA or gRNA component may alternatively or additionally comprise one or more phosphorothioate bonds between residues at the 3′ end of the polynucleotide, for example, a phosphrothioate bond between the first two 3′ residues, between each of the first three 3′ residues, between each of the first four 3′ residues, or between each of the first five 3′ residues. In an embodiment, the gRNA (e.g., the sgRNA or the tracr and/or crRNA of a dgRNA), e.g., any of the gRNA or gRNA components described above, comprises a phosphorothioate bond between each of the first four 5′ residues (e.g., comprises, e.g., consists of, three phosphorothioate bonds at the 5′ end(s)), and a phosphorothioate bond between each of the first four 3′ residues (e.g., comprises, e.g., consists of, three phosphorothioate bonds at the 3′ end(s)). In an embodiment, any of the phosphorothioate modifications described above are combined with an inverted abasic residue at the 5′ end, the 3′ end, or both the 5′ and 3′ ends of the polynucleotide. In such embodiments, the inverted abasic nucleotide may be linked to the 5′ and/or 3′ nucleotide by a phosphate bond or a phosphorothioate bond. In embodiments, the gRNA (e.g., the sgRNA or the tracr and/or crRNA of a dgRNA), e.g., any of the gRNA or gRNA components described above, comprises one or more nucleotides that include a 2′ O-methyl modification. In embodiments, each of the first 1, 2, 3, or more of the 5′ residues comprise a 2′ O-methyl modification. In embodiments, each of the first 1, 2, 3, or more of the 3′ residues comprise a 2′ O-methyl modification. In embodiments, the 4^{th}-to-terminal, 3^{rd}-to-terminal, and 2^{nd}-to-terminal 3′ residues comprise a 2′ O-methyl modification. In embodiments, each of the first 1, 2, 3 or more of the 5′ residues comprise a 2′ O-methyl modification, and each of the first 1, 2, 3 or more of the 3′ residues comprise a 2′ O-methyl modification. In an embodiment, each of the first 3 of the 5′ residues comprise a 2′ O-methyl modification, and each of the first 3 of the 3′ residues comprise a 2′ O-methyl modification. In embodiments, each of the first 3 of the 5′ residues comprise a 2′ O-methyl modification, and the 4^{th}-to-terminal, 3^{rd}-to-terminal, and 2^{nd}-to-terminal 3′ residues comprise a 2′ O-methyl modification. In embodiments, any of the 2′ O-methyl modifications, e.g., as described above, may be combined with one or more phosphorothioate modifications, e.g., as described above, and/or one or more inverted abasic modifications, e.g., as described above. In an embodiment, the gRNA (e.g., the sgRNA or the tracr and/or crRNA of a dgRNA), e.g., any of the gRNA or gRNA components described above, comprises, e.g., consists of, a phosphorothioate bond between each of the first four 5′ residues (e.g., comprises, e.g., consists of three phosphorothioate bonds at the 5′ end of the polynucleotide(s)), a phosphorothioate bond between each of the first four 3′ residues (e.g., comprises, e.g., consists of three phosphorothioate bonds at the 5′ end of the polynucleotide(s)), a 2′ O-methyl modification at each of the first three 5′ residues, and a 2′ O-methyl modification at each of the first three 3′ residues. In an embodiment, the gRNA (e.g., the sgRNA or the tracr and/or crRNA of a dgRNA), e.g., any of the gRNA or gRNA components described above, comprises, e.g., consists of, a phosphorothioate bond between each of the first four 5′ residues (e.g., comprises, e.g., consists of three phosphorothioate bonds at the 5′ end of the polynucleotide(s)), a phosphorothioate bond between each of the first four 3′ residues (e.g., comprises, e.g., consists of three phosphorothioate bonds at the 5′ end of the polynucleotide(s)), a 2′ O-methyl modification at each of the first three 5′ residues, and a 2′ O-methyl modification at each of the 4^{th}-to-terminal, 3^{rd}-to-terminal, and 2^{nd}-to-terminal 3′ residues.

[0328] In an embodiment, the gRNA (e.g., the sgRNA or the tracr and/or crRNA of a dgRNA), e.g., any of the gRNA or gRNA components described above, comprises, e.g., consists of, a phosphorothioate bond between each of the first four 5′ residues (e.g., comprises, e.g., consists of three phosphorothioate bonds at the 5′ end of the polynucleotide(s)), a phosphorothioate bond between each of the first four 3′ residues (e.g., comprises, e.g., consists of three phosphorothioate bonds at the 5′ end of the polynucleotide(s)), a 2′ O-methyl modification at each of the first three 5′ residues, a 2′ O-methyl modification at each of the first three 3′ residues, and an additional inverted abasic residue at each of the 5′ and 3′ ends.

[0329] In an embodiment, the gRNA (e.g., the sgRNA or the tracr and/or crRNA of a dgRNA), e.g., any of the gRNA or gRNA components described above, comprises, e.g., consists of, a phosphorothioate bond between each of the first four 5′ residues (e.g., comprises, e.g., consists of three phosphorothioate bonds at the 5′ end of the polynucleotide(s)), a phosphorothioate bond between each of the first four 3′ residues (e.g., comprises, e.g., consists of three phosphorothioate bonds at the 5′ end of the polynucleotide(s)), a 2′ O-methyl modification at each of the first three 5′ residues, and a 2′ O-methyl modification at each of the 4^{th}-to-terminal, 3^{rd}-to-terminal, and 2^{nd}-to-terminal 3′ residues, and an additional inverted abasic residue at each of the 5′ and 3′ ends.

[0330] In an embodiment, the gRNA is a dgRNA and comprises, e.g., consists of:

crRNA:
mN*mN*mN*NNNNNNNNNNNNNNNNNGUUUUAGAGCUAU*mG*mC*mU, where m indicates a base with 2′O-Methyl modification, * indicates a phosphorothioate bond, and N's indicate the residues of the targeting domain, e.g., as described herein, (optionally with an inverted abasic residue at the 5′ and/or 3′ terminus); and
tracr:
AACAGCAUAGCAAGUUAAAAUAAGGCUAGUCCGUUAUCAACUUGAAAAAGUGGCACC GAGUCGGUGCUUUUUUU (SEQ ID NO: 6660) (optionally with an inverted abasic residue at the 5′ and/or 3′ terminus).

[0331] In an embodiment, the gRNA is a dgRNA and comprises, e.g., consists of:

crRNA:
mN*mN*mN*NNNNNNNNNNNNNNNNNGUUUUAGAGCUAU*mG*mC*mU, where m indicates a base with 2′O-Methyl modification, * indicates a phosphorothioate bond, and N's indicate the residues of the targeting domain, e.g., as described herein, (optionally with an inverted abasic residue at the 5′ and/or 3′ terminus); and
tracr:
mA*mA*mC*AGCAUAGCAAGUUAAAAUAAGGCUAGUCCGUUAUCAACUUGAAAAAGUG GCACCGAGUCGGUGCUUUU*mU*mU*mU (SEQ ID NO: 346), where m indicates a base with 2′O-Methyl modification, * indicates a phosphorothioate bond, and N's indicate the residues of the targeting domain, e.g., as described herein, (optionally with an inverted abasic residue at the 5′ and/or 3′ terminus).

[0332] In an embodiment, the gRNA is a dgRNA and comprises, e.g., consists of:

crRNA:
mN*mN*mN*NNNNNNNNNNNNNNNNNGUUUUAGAGCUAUGCUGUU*mU*mU*mG, where m indicates a base with 2′O-Methyl modification, * indicates a phosphorothioate bond, and N's indicate the residues of the targeting domain, e.g., as described herein, (optionally with an inverted abasic residue at the 5′ and/or 3′ terminus); and
tracr:
AACAGCAUAGCAAGUUAAAAUAAGGCUAGUCCGUUAUCAACUUGAAAAAGUGGCACC GAGUCGGUGCUUUUUUU (SEQ ID NO: 6660) (optionally with an inverted abasic residue at the 5′ and/or 3′ terminus).

[0333] In an embodiment, the gRNA is a dgRNA and comprises, e.g., consists of:

crRNA:
mN*mN*mN*NNNNNNNNNNNNNNNNNGUUUUAGAGCUAUGCUGUU*mU*mU*mG, where m indicates a base with 2′O-Methyl modification, * indicates a phosphorothioate bond, and N's indicate the residues of the targeting domain, e.g., as described herein, (optionally with an inverted abasic residue at the 5′ and/or 3′ terminus); and
tracr:
mA*mA*mC*AGCAUAGCAAGUUAAAAUAAGGCUAGUCCGUUAUCAACUUGAAAAAGUG GCACCGAGUCGGUGCUUUU*mU*mU*mU (SEQ ID NO: 346), where m indicates a base with 2′O-Methyl modification, and * indicates a phosphorothioate bond (optionally with an inverted abasic residue at the 5′ and/or 3′ terminus).

[0334] In an embodiment, the gRNA is a dgRNA and comprises, e.g., consists of:

crRNA:
NNNNNNNNNNNNNNNNNNNNGUUUUAGAGCUAUGCUGUUUUG, where N's indicate the residues of the targeting domain, e.g., as described herein, (optionally with an inverted abasic residue at the 5′ and/or 3′ terminus); and
tracr:
mA*mA*mC*AGCAUAGCAAGUUAAAAUAAGGCUAGUCCGUUAUCAACUUGAAAAAGUG GCACCGAGUCGGUGCUUUU*mU*mU*mU (SEQ ID NO: 346), where m indicates a base with 20-Methyl modification, and * indicates a phosphorothioate bond (optionally with an inverted abasic residue at the 5′ and/or 3′ terminus).

[0335] In an embodiment, the gRNA is a sgRNA and comprises, e.g., consists of:

NNNNNNNNNNNNNNNNNNNNGUUUUAGAGCUAGAAAUAGCAAGUUAAAAUAAGGCUA GUCCGUUAUCAACUUGAAAAAGUGGCACCGAGUCGGUGCUUUU, where m indicates a base with 2′O-Methyl modification, * indicates a phosphorothioate bond, and N's indicate the residues of the targeting domain, e.g., as described herein, (optionally with an inverted abasic residue at the 5′ and/or 3′ terminus).

[0336] In an embodiment, the gRNA is a sgRNA and comprises, e.g., consists of:

mN*mN*mN*NNNNNNNNNNNNNNNNNGUUUUAGAGCUAGAAAUAGCAAGUUAAAAUA AGGCUAGUCCGUUAUCAACUUGAAAAAGUGGCACCGAGUCGGUGCU*mU*mU*mU, where m indicates a base with 2′O-Methyl modification, * indicates a phosphorothioate bond, and N's indicate the residues of the targeting domain, e.g., as described herein, (optionally with an inverted abasic residue at the 5′ and/or 3′ terminus).

[0337] In an embodiment, the gRNA is a sgRNA and comprises, e.g., consists of:

mN*mN*mN*NNNNNNNNNNNNNNNNNGUUUUAGAGCUAGAAAUAGCAAGUUAAAAUA AGGCUAGUCCGUUAUCAACUUGAAAAAGUGGCACCGAGUCGGUGCmU*mU*mU*U, where m indicates a base with 2′O-Methyl modification, * indicates a phosphorothioate bond, and N's indicate the residues of the targeting domain, e.g., as described herein, (optionally with an inverted abasic residue at the 5′ and/or 3′ terminus).

### 6) First Tracr Extension

[0338] Where the gRNA comprises a first flagpole extension, the tracr may comprise a first tracr extension. The first tracr extension may comprise nucleotides that are complementary, e.g., 80%, 85%, 90%, 95% or 99%, e.g., fully complementary, with nucleotides of the first flagpole extension. In some aspects, the first tracr extension nucleotides that hybridize with complementary nucleotides of the first flagpole extension are contiguous. In some aspects, the first tracr extension nucleotides that hybridize with complementary nucleotides of the first flagpole extension are discontinuous, e.g., comprises two or more regions of hybridization separated by nucleotides that do not base pair with nucleotides of the first flagpole extension. In some aspects, the first tracr extension comprises at least 2, 3, 4, 5, 6, 7, 8, 9, 10, 11, 12, 13, 14, 15, 16, 17, 18, 19, 20 or more nucleotides. In some aspects, the first tracr extension comprises SEQ ID NO: 6591. In some aspects the first tracr extension comprises nucleic acid that is at least 80%, 85%, 90%, 95% or 99% homology to SEQ ID NO: 6591.

[0339] Some or all of the nucleotides of the first tracr extension can have a modification, e.g., modification found in Section XIII herein.

[0340] In some embodiments, the sgRNA may comprise, from 5′ to 3′, disposed 3′ to the targeting domain:

a)

(SEQ ID NO: 6601)

GUUUUAGAGCUAGAAAUAGCAAGUUAAAAUAAGGCUAGUCCGUUAUCAAC
UUGAAAAAGUGGCACCGAGUCGGUGC;
b)

(SEQ ID NO: 6602)

GUUUAAGAGCUAGAAAUAGCAAGUUUAAAUAAGGCUAGUCCGUUAUCAAC
UUGAAAAAGUGGCACCGAGUCGGUGC;
c)

(SEQ ID NO: 6603)

GUUUUAGAGCUAUGCUGGAAACAGCAUAGCAAGUUAAAAUAAGGCUAGUC
CGUUAUCAACUUGAAAAAGUGGCACCGAGUCGGUGC;
d)

(SEQ ID NO: 6604)

GUUUAAGAGCUAUGCUGGAAACAGCAUAGCAAGUUUAAAUAAGGCUAGUC
CGUUAUCAACUUGAAAAAGUGGCACCGAGUCGGUGC;

e) any of a) to d), above, further comprising, at the 3′ end, at least 1, 2, 3, 4, 5, 6 or 7 uracil (U) nucleotides, e.g., 1, 2, 3, 4, 5, 6, or 7 uracil (U) nucleotides;
f) any of a) to d), above, further comprising, at the 3′ end, at least 1, 2, 3, 4, 5, 6 or 7 adenine (A) nucleotides, e.g., 1, 2, 3, 4, 5, 6, or 7 adenine (A) nucleotides; or
g) any of a) to f), above, further comprising, at the 5′ end (e.g., at the 5′ terminus, e.g., 5′ to the targeting domain), at least 1, 2, 3, 4, 5, 6 or 7 adenine (A) nucleotides, e.g., 1, 2, 3, 4, 5, 6, or 7 adenine (A) nucleotides. In embodiments, any of a) to g) above is disposed directly 3′ to the targeting domain.

[0341] In an embodiment, a sgRNA of the invention comprises, e.g., consists of, from 5′ to 3′: [targeting domain]-

(SEQ ID NO: 7811)

GUUUUAGAGCUAGAAAUAGCAAGUUAAAAUAAGGCUAGUCCGUUAUCAAC
UUGAAAAAGUGGCACCGAGUCGGUGCUUUU.

[0342] In an embodiment, a sgRNA of the invention comprises, e.g., consists of, from 5′ to 3′: [targeting domain]-

(SEQ ID NO: 7807)

GUUUAAGAGCUAUGCUGGAAACAGCAUAGCAAGUUUAAAUAAGGCUAGUC
CGUUAUCAACUUGAAAAAGUGGCACCGAGUCGGUGCUUUU.

[0343] In some embodiments, the dgRNA may comprise:

[0344] A crRNA comprising, from 5′ to 3′, preferrably disposed directly 3′ to the targeting domain:

a)

(SEQ ID NO: 6584)

GUUUUAGAGCUA;
b)

(SEQ ID NO: 6585)

GUUUAAGAGCUA;
c)

(SEQ ID NO: 6605)

GUUUUAGAGCUAUGCUG;
d)

(SEQ ID NO: 6606)

GUUUAAGAGCUAUGCUG;
e)

(SEQ ID NO: 6607)

GUUUUAGAGCUAUGCUGUUUUG;
f)

(SEQ ID NO: 6608)

GUUUAAGAGCUAUGCUGUUUUG;
or
g)

(SEQ ID NO: 7806)

GUUUUAGAGCUAUGCU:

and a tracr comprising, from 5′ to 3′:

a)

(SEQ ID NO: 6589)

UAGCAAGUUAAAAUAAGGCUAGUCCGUUAUCAACUUGAAAAAGUGGCACC
GAGUCGGUGC;
b)

(SEQ ID NO: 6590)

UAGCAAGUUUAAAUAAGGCUAGUCCGUUAUCAACUUGAAAAAGUGGCACC
GAGUCGGUGC;
c)

(SEQ ID NO: 6609)

CAGCAUAGCAAGUUAAAAUAAGGCUAGUCCGUUAUCAACUUGAAAAAGUG
GCACCGAGUCGGUGC;
d)

(SEQ ID NO: 6610)

CAGCAUAGCAAGUUUAAAUAAGGCUAGUCCGUUAUCAACUUGAAAAAGUG
GCACCGAGUCGGUGC;
e)

(SEQ ID NO: 6660)

AACAGCAUAGCAAGUUAAAAUAAGGCUAGUCCGUUAUCAACUUGAAAAAG
UGGCACCGAGUCGGUGCUUUUUUU;
f)

(SEQ ID NO: 6661)

AACAGCAUAGCAAGUUUAAAUAAGGCUAGUCCGUUAUCAACUUGAAAAAG
UGGCACCGAGUCGGUGCUUUUUUU;
g)

(SEQ ID NO: 7812)

AACAGCAUAGCAAGUUAAAAUAAGGCUAGUCCGUUAUCAACUUGAAAAAG
UGGCACCGAGUCGGUGC
h)

(SEQ ID NO: 7807)

GUUUAAGAGCUAUGCUGGAAACAGCAUAGCAAGUUUAAAUAAGGCUAGUC
CGUUAUCAACUUGAAAAAGUGGCACCGAGUCGGUGCUUUU;
i)

(SEQ ID NO: 7808)

AGCAUAGCAAGUUAAAAUAAGGCUAGUCCGUUAUCAACUUGAAAAAGUGG
CACCGAGUCGGUGCUUU;
j)

(SEQ ID NO: 7809)

GUUGGAACCAUUCAAAACAGCAUAGCAAGUUAAAAUAAGGCUAGUCCGUU
AUCAACUUGAAAAAGUGGCACCGAGUCGGUGCUUU;

k) any of a) to j), above, further comprising, at the 3′ end, at least 1, 2, 3, 4, 5, 6 or 7 uracil (U) nucleotides, e.g., 1, 2, 3, 4, 5, 6, or 7 uracil (U) nucleotides;
l) any of a) to j), above, further comprising, at the 3′ end, at least 1, 2, 3, 4, 5, 6 or 7 adenine (A) nucleotides, e.g., 1, 2, 3, 4, 5, 6, or 7 adenine (A) nucleotides; or
m) any of a) to l), above, further comprising, at the 5′ end (e.g., at the 5′ terminus), at least 1, 2, 3, 4, 5, 6 or 7 adenine (A) nucleotides, e.g., 1, 2, 3, 4, 5, 6, or 7 adenine (A) nucleotides.

[0345] In an embodiment, the sequence of k), above comprises the 3′ sequence UUUUUU, e.g., if a U6 promoter is used for transcription. In an embodiment, the sequence of k), above, comprises the 3′ sequence UUUU, e.g., if an HI promoter is used for transcription. In an embodiment, sequence of k), above, comprises variable numbers of 3′ U's depending, e.g., on the termination signal of the pol-III promoter used. In an embodiment, the sequence of k), above, comprises variable 3′ sequence derived from the DNA template if a T7 promoter is used. In an embodiment, the sequence of k), above, comprises variable 3′ sequence derived from the DNA template, e.g., if in vitro transcription is used to generate the RNA molecule. In an embodiment, the sequence of k), above, comprises variable 3′ sequence derived from the DNA template, e.g, if a pol-II promoter is used to drive transcription.

[0346] In an embodiment, the crRNA comprises, e.g., consists of, a targeting domain and, disposed 3′ to the targeting domain (e.g., disposed directly 3′ to the targeting domain), a sequence comprising, e.g., consisting of, SEQ ID NO: 6607, and the tracr comprises, e.g., consists of

(SEQ ID NO: 6660)

AACAGCAUAGCAAGUUAAAAUAAGGCUAGUCCGUUAUCAACUUGAAAAAG
UGGCACCGAGUCGGUGCUUUUUUU.

[0347] In an embodiment, the crRNA comprises, e.g., consists of, a targeting domain and, disposed 3′ to the targeting domain (e.g., disposed directly 3′ to the targeting domain), a sequence comprising, e.g., consisting of, SEQ ID NO: 6608, and the tracr comprises, e.g., consists of,

(SEQ ID NO: 6661)

AACAGCAUAGCAAGUUUAAAUAAGGCUAGUCCGUUAUCAACUUGAAAAAG
UGGCACCGAGUCGGUGCUUUUUUU.

[0348] In an embodiment, the crRNA comprises, e.g., consists of, a targeting domain and, disposed 3′ to the targeting domain (e.g., disposed directly 3′ to the targeting domain), a sequence comprising, e.g., consisting of, GUUUUAGAGCUAUGCU (SEQ ID NO: 7806), and the tracr comprises, e.g., consists of,

(SEQ ID NO: 7807)

GUUUAAGAGCUAUGCUGGAAACAGCAUAGCAAGUUUAAAUAAGGCUAGUC
CGUUAUCAACUUGAAAAAGUGGCACCGAGUCGGUGCUUUU.

[0349] In an embodiment, the crRNA comprises, e.g., consists of, a targeting domain and, disposed 3′ to the targeting domain (e.g., disposed directly 3′ to the targeting domain), a sequence comprising, e.g., consisting of, GUUUUAGAGCUAUGCU (SEQ ID NO: 7806), and the tracr comprises, e.g., consists of,

(SEQ ID NO: 7808)

AGCAUAGCAAGUUAAAAUAAGGCUAGUCCGUUAUCAACUUGAAAAAGUGG
CACCGAGUCGGUGCUUU.

[0350] In an embodiment, the crRNA comprises, e.g., consists of, a targeting domain and, disposed 3′ to the targeting domain (e.g., disposed directly 3′ to the targeting domain), a sequence comprising, e.g., consisting of, GUUUUAGAGCUAUGCUGUUUUG (SEQ ID NO: 6607), and the tracr comprises, e.g., consists of,

(SEQ ID NO: 7809)

GUUGGAACCAUUCAAAACAGCAUAGCAAGUUAAAAUAAGGCUAGUCCGUU
AUCAACUUGAAAAAGUGGCACCGAGUCGGUGCUUU.

### II. Targeting Domains Useful for Altering Expression of Globin Genes

[0351] Provided in the tables below are targeting domains for gRNA molecules for use in the various aspect of the present invention, for example, in altering expression of globin genes, for example, a fetal hemoglobin gene or a hemoglobin beta gene.

TABLE 1
gRNA targeting domains directed to BLC11a exon regions

| | | | | | | SEQ |
|---|---|---|---|---|---|---|
| | | Target | | Targeting Site | | ID |
| Id. | Target | Region | Strand | (hg38) | gRNA Targeting Domain | NO: |
| 53335_5_1 | BCL11a | Exon 5 | + | chr2: 60451170-60451195 | CAGUCAUUAUUUAUUAUGA | 400 |
| | | | | | AUAAGC | |
| 53335_5_2 | BCL11a | Exon 5 | + | chr2: 60451196-60451221 | GGAAAUAAUUCACAUGCCA | 401 |
| | | | | | AUUAUU | |
| 53335_5_3 | BCL11a | Exon 5 | + | chr2: 60451217-60451242 | UAUUUGGCUAUCUUUUCAC | 402 |
| | | | | | UAAGCU | |
| 53335_5_4 | BCL11a | Exon 5 | + | chr2: 60451233-60451258 | CACUAAGCUAGGUAAUCUA | 403 |
| | | | | | GCCAGA | |
| 53335_5_5 | BCL11a | Exon 5 | + | chr2: 60451236-60451261 | UAAGCUAGGUAAUCUAGCC | 404 |
| | | | | | AGAAGG | |
| 53335_5_6 | BCL11a | Exon 5 | + | chr2: 60451241-60451266 | UAGGUAAUCUAGCCAGAAG | 405 |
| | | | | | GUGGAU | |
| 53335_5_7 | BCL11a | Exon 5 | + | chr2: 60451245-60451270 | UAAUCUAGCCAGAAGGUGG | 406 |
| | | | | | AUAGGU | |
| 53335_5_8 | BCL11a | Exon 5 | + | chr2: 60451261-60451286 | UGGAUAGGUAGGAUUUUCC | 407 |
| | | | | | CCACUU | |
| 53335_5_9 | BCL11a | Exon 5 | + | chr2: 60451268-60451293 | GUAGGAUUUUCCCCACUUA | 408 |
| | | | | | GGUUCA | |
| 53335_5_10 | BCL11a | Exon 5 | + | chr2: 60451295-60451320 | GCCUGUAUGUGAAUCUACA | 409 |
| | | | | | GCACAC | |
| 53335_5_11 | BCL11a | Exon 5 | + | chr2: 60451359-60451384 | UGCUAUGUUGUUUCUAAUU | 410 |
| | | | | | CUCUUC | |
| 53335_5_12 | BCL11a | Exon 5 | + | chr2: 60451414-60451439 | UGAGAAAAGUUCUGUGCAA | 411 |
| | | | | | AUUAAC | |
| 53335_5_13 | BCL11a | Exon 5 | + | chr2: 60451415-60451440 | GAGAAAAGUUCUGUGCAAA | 412 |
| | | | | | UUAACU | |
| 53335_5_14 | BCL11a | Exon 5 | + | chr2: 60451462-60451487 | CCUGUUUGUAGAUGUAACU | 413 |
| | | | | | UAUUUG | |
| 53335_5_15 | BCL11a | Exon 5 | + | chr2: 60451477-60451502 | AACUUAUUUGUGGCACUAA | 414 |
| | | | | | UUUCUA | |
| 53335_5_16 | BCL11a | Exon 5 | + | chr2: 60451625-60451650 | GUCUGCAUUAAGAUAUAUU | 415 |
| | | | | | UCCUGA | |
| 53335_5_17 | BCL11a | Exon 5 | + | chr2: 60451630-60451655 | CAUUAAGAUAUAUUUCCUG | 416 |
| | | | | | AAGGUU | |
| 53335_5_18 | BCL11a | Exon 5 | + | chr2: 60451631-60451656 | AUUAAGAUAUAUUUCCUGA | 417 |
| | | | | | AGGUUU | |
| 53335_5_19 | BCL11a | Exon 5 | + | chr2: 60451687-60451712 | ACUACUGACAUUUAUCACC | 418 |
| | | | | | UUCUUU | |
| 53335_5_20 | BCL11a | Exon 5 | + | chr2: 60451754-60451779 | UUAAAAGACAAAUUCAAAU | 419 |
| | | | | | CCUGCA | |
| 53335_5_21 | BCL11a | Exon 5 | + | chr2: 60451786-60451811 | CACCAAAAGCAUAUAUUUG | 420 |
| | | | | | AAAAAC | |
| 53335_5_22 | BCL11a | Exon 5 | + | chr2: 60451792-60451817 | AAGCAUAUAUUUGAAAAAC | 421 |
| | | | | | AGGAUU | |
| 53335_5_23 | BCL11a | Exon 5 | + | chr2: 60451819-60451844 | GCGUGCCAUAUUAUGCAUU | 422 |
| | | | | | AUUUAA | |
| 53335_5_24 | BCL11a | Exon 5 | + | chr2: 60451847-60451872 | UAUGCAAAUUAUAAGUCAG | 423 |
| | | | | | ACAGUU | |
| 53335_5_25 | BCL11a | Exon 5 | + | chr2: 60451971-60451996 | UUGAAAAUUUAUGCCAUCU | 424 |
| | | | | | GAUAAG | |
| 53335_5_26 | BCL11a | Exon 5 | + | chr2: 60452037-60452062 | AAAUCUGUUCCUCCUACCC | 425 |
| | | | | | ACCCGA | |
| 53335_5_27 | BCL11a | Exon 5 | + | chr2: 60452038-60452063 | AAUCUGUUCCUCCUACCCA | 426 |
| | | | | | CCCGAU | |
| 53335_5_28 | BCL11a | Exon 5 | + | chr2: 60452048-60452073 | UCCUACCCACCCGAUGGGU | 427 |
| | | | | | GUCUGU | |
| 53335_5_29 | BCL11a | Exon 5 | + | chr2: 60452055-60452080 | CACCCGAUGGGUGUCUGUA | 428 |
| | | | | | GGAAAC | |
| 53335_5_30 | BCL11a | Exon 5 | + | chr2: 60452203-60452228 | AGACAACAUAGAAUGUAUA | 429 |
| | | | | | GAAACA | |
| 53335_5_31 | BCL11a | Exon 5 | + | chr2: 60452204-60452229 | GACAACAUAGAAUGUAUAG | 430 |
| | | | | | AAACAA | |
| 53335_5_32 | BCL11a | Exon 5 | + | chr2: 60452205-60452230 | ACAACAUAGAAUGUAUAGA | 431 |
| | | | | | AACAAG | |
| 53335_5_33 | BCL11a | Exon 5 | + | chr2: 60452209-60452234 | CAUAGAAUGUAUAGAAACA | 432 |
| | | | | | AGGGGU | |
| 53335_5_34 | BCL11a | Exon 5 | + | chr2: 60452210-60452235 | AUAGAAUGUAUAGAAACAA | 433 |
| | | | | | GGGGUU | |
| 53335_5_35 | BCL11a | Exon 5 | + | chr2: 60452211-60452236 | UAGAAUGUAUAGAAACAAG | 434 |
| | | | | | GGGUUG | |
| 53335_5_36 | BCL11a | Exon 5 | + | chr2: 60452237-60452262 | GGACUCAUGCGCAUUUCCA | 435 |
| | | | | | CAAUAC | |
| 53335_5_37 | BCL11a | Exon 5 | + | chr2: 60452245-60452270 | GCGCAUUUCCACAAUACAG | 436 |
| | | | | | GUAAUU | |
| 53335_5_38 | BCL11a | Exon 5 | + | chr2: 60452249-60452274 | AUUUCCACAAUACAGGUAA | 437 |
| | | | | | UUAGGU | |
| 53335_5_39 | BCL11a | Exon 5 | + | chr2: 60452253-60452278 | CCACAAUACAGGUAAUUAG | 438 |
| | | | | | GUUGGC | |
| 53335_5_40 | BCL11a | Exon 5 | + | chr2: 60452263-60452288 | GGUAAUUAGGUUGGCUGGU | 439 |
| | | | | | UUCAGA | |
| 53335_5_41 | BCL11a | Exon 5 | + | chr2: 60452264-60452289 | GUAAUUAGGUUGGCUGGUU | 440 |
| | | | | | UCAGAA | |
| 53335_5_42 | BCL11a | Exon 5 | + | chr2: 60452269-60452294 | UAGGUUGGCUGGUUUCAGA | 441 |
| | | | | | AGGGCC | |
| 53335_5_43 | BCL11a | Exon 5 | + | chr2: 60452270-60452295 | AGGUUGGCUGGUUUCAGAA | 442 |
| | | | | | GGGCCA | |
| 53335_5_44 | BCL11a | Exon 5 | + | chr2: 60452291-60452316 | GCCAGGGCAUCACUCAUGA | 443 |
| | | | | | CAGCGA | |
| 53335_5_45 | BCL11a | Exon 5 | + | chr2: 60452298-60452323 | CAUCACUCAUGACAGCGAU | 444 |
| | | | | | GGUCCA | |
| 53335_5_46 | BCL11a | Exon 5 | + | chr2: 60452299-60452324 | AUCACUCAUGACAGCGAUG | 445 |
| | | | | | GUCCAC | |
| 53335_5_47 | BCL11a | Exon 5 | + | chr2: 60452311-60452336 | AGCGAUGGUCCACGGGCCC | 446 |
| | | | | | UCUCUA | |
| 53335_5_48 | BCL11a | Exon 5 | + | chr2: 60452312-60452337 | GCGAUGGUCCACGGGCCCU | 447 |
| | | | | | CUCUAU | |
| 53335_5_49 | BCL11a | Exon 5 | + | chr2: 60452335-60452360 | AUGGGACUGAUUCACUGUU | 448 |
| | | | | | CCAAUG | |
| 53335_5_50 | BCL11a | Exon 5 | + | chr2: 60452336-60452361 | UGGGACUGAUUCACUGUUC | 449 |
| | | | | | CAAUGU | |
| 53335_5_51 | BCL11a | Exon 5 | + | chr2: 60452383-60452408 | UUUUUAUUAAAAAAUAUAA | 450 |
| | | | | | AUAAAA | |
| 53335_5_52 | BCL11a | Exon 5 | + | chr2: 60452392-60452417 | AAAAAUAUAAAUAAAAUGG | 451 |
| | | | | | CGCUGC | |
| 53335_5_53 | BCL11a | Exon 5 | + | chr2: 60452398-60452423 | AUAAAUAAAAUGGCGCUGC | 452 |
| | | | | | AGGCCU | |
| 53335_5_54 | BCL11a | Exon 5 | + | chr2: 60452402-60452427 | AUAAAAUGGCGCUGCAGGC | 453 |
| | | | | | CUAGGC | |
| 53335_5_55 | BCL11a | Exon 5 | + | chr2: 60452406-60452431 | AAUGGCGCUGCAGGCCUAG | 454 |
| | | | | | GCUGGA | |
| 53335_5_56 | BCL11a | Exon 5 | + | chr2: 60452416-60452441 | CAGGCCUAGGCUGGAAGGA | 455 |
| | | | | | CUCUGC | |
| 53335_5_57 | BCL11a | Exon 5 | + | chr2: 60452436-60452461 | UCUGCAGGACUCUGUCUUC | 456 |
| | | | | | GCACAA | |
| 53335_5_58 | BCL11a | Exon 5 | + | chr2: 60452444-60452469 | ACUCUGUCUUCGCACAACG | 457 |
| | | | | | GCUUCU | |
| 53335_5_59 | BCL11a | Exon 5 | + | chr2: 60452447-60452472 | CUGUCUUCGCACAACGGCU | 458 |
| | | | | | UCUUGG | |
| 53335_5_60 | BCL11a | Exon 5 | + | chr2: 60452478-60452503 | CUGUCAGAAAACAUCACAA | 459 |
| | | | | | ACUAGC | |
| 53335_5_61 | BCL11a | Exon 5 | + | chr2: 60452505-60452530 | GAUGACAGACCACGCUGAC | 460 |
| | | | | | GUCGAC | |
| 53335_5_62 | BCL11a | Exon 5 | + | chr2: 60452506-60452531 | AUGACAGACCACGCUGACG | 461 |
| | | | | | UCGACU | |
| 53335_5_63 | BCL11a | Exon 5 | + | chr2: 60452509-60452534 | ACAGACCACGCUGACGUCG | 462 |
| | | | | | ACUGGG | |
| 53335_5_64 | BCL11a | Exon 5 | + | chr2: 60452531-60452556 | GGGCGGCACGCGUCCACCC | 463 |
| | | | | | CACCCC | |
| 53335_5_65 | BCL11a | Exon 5 | + | chr2: 60452532-60452557 | GGCGGCACGCGUCCACCCC | 464 |
| | | | | | ACCCCU | |
| 53335_5_66 | BCL11a | Exon 5 | + | chr2: 60452533-60452558 | GCGGCACGCGUCCACCCCA | 465 |
| | | | | | CCCCUG | |
| 53335_5_67 | BCL11a | Exon 5 | + | chr2: 60452534-60452559 | CGGCACGCGUCCACCCCACC | 466 |
| | | | | | CCUGG | |
| 53335_5_68 | BCL11a | Exon 5 | + | chr2: 60452559-60452584 | GGGCUUCAAAUUUUCUCAG | 467 |
| | | | | | AACUUA | |
| 53335_5_69 | BCL11a | Exon 5 | + | chr2: 60452560-60452585 | GGCUUCAAAUUUUCUCAGA | 468 |
| | | | | | ACUUAA | |
| 53335_5_70 | BCL11a | Exon 5 | + | chr2: 60452607-60452632 | AAACUGCCACACAUCUUGA | 469 |
| | | | | | GCUCUC | |
| 53335_5_71 | BCL11a | Exon 5 | + | chr2: 60452608-60452633 | AACUGCCACACAUCUUGAG | 470 |
| | | | | | CUCUCU | |
| 53335_5_72 | BCL11a | Exon 5 | + | chr2: 60452623-60452648 | UGAGCUCUCUGGGUACUAC | 471 |
| | | | | | GCCGAA | |
| 53335_5_73 | BCL11a | Exon 5 | + | chr2: 60452624-60452649 | GAGCUCUCUGGGUACUACG | 472 |
| | | | | | CCGAAU | |
| 53335_5_74 | BCL11a | Exon 5 | + | chr2: 60452625-60452650 | AGCUCUCUGGGUACUACGC | 473 |
| | | | | | CGAAUG | |
| 53335_5_75 | BCL11a | Exon 5 | + | chr2: 60452626-60452651 | GCUCUCUGGGUACUACGCC | 474 |
| | | | | | GAAUGG | |
| 53335_5_76 | BCL11a | Exon 5 | + | chr2: 60452649-60452674 | GGGGGUGUGUGAAGAACCU | 475 |
| | | | | | AGAAAG | |
| 53335_5_77 | BCL11a | Exon 5 | + | chr2: 60452653-60452678 | GUGUGUGAAGAACCUAGAA | 476 |
| | | | | | AGAGGU | |
| 53335_5_78 | BCL11a | Exon 5 | + | chr2: 60452662-60452687 | GAACCUAGAAAGAGGUUGG | 477 |
| | | | | | AGACAG | |
| 53335_5_79 | BCL11a | Exon 5 | − | chr2: 60451215-60451240 | CUUAGUGAAAAGAUAGCCA | 478 |
| | | | | | AAUAAU | |
| 53335_5_80 | BCL11a | Exon 5 | − | chr2: 60451256-60451281 | GGGAAAAUCCUACCUAUCC | 479 |
| | | | | | ACCUUC | |
| 53335_5_81 | BCL11a | Exon 5 | − | chr2: 60451281-60451306 | CACAUACAGGCCGUGAACC | 480 |
| | | | | | UAAGUG | |
| 53335_5_82 | BCL11a | Exon 5 | − | chr2: 60451282-60451307 | UCACAUACAGGCCGUGAAC | 481 |
| | | | | | CUAAGU | |
| 53335_5_83 | BCL11a | Exon 5 | − | chr2: 60451283-60451308 | UUCACAUACAGGCCGUGAA | 482 |
| | | | | | CCUAAG | |
| 53335_5_84 | BCL11a | Exon 5 | − | chr2: 60451299-60451324 | ACCUGUGUGCUGUAGAUUC | 483 |
| | | | | | ACAUAC | |
| 53335_5_85 | BCL11a | Exon 5 | − | chr2: 60451350-60451375 | UAGAAACAACAUAGCAAAU | 484 |
| | | | | | UAAAAU | |
| 53335_5_86 | BCL11a | Exon 5 | − | chr2: 60451394-60451419 | UCUCAGUUUGGUAUUUUUU | 485 |
| | | | | | ACUGCU | |
| 53335_5_87 | BCL11a | Exon 5 | − | chr2: 60451411-60451436 | AAUUUGCACAGAACUUUUC | 486 |
| | | | | | UCAGUU | |
| 53335_5_88 | BCL11a | Exon 5 | − | chr2: 60451446-60451471 | ACAAACAGGUGGUAAAAAU | 487 |
| | | | | | UCUUUC | |
| 53335_5_89 | BCL11a | Exon 5 | − | chr2: 60451462-60451487 | CAAAUAAGUUACAUCUACA | 488 |
| | | | | | AACAGG | |
| 53335_5_90 | BCL11a | Exon 5 | − | chr2: 60451465-60451490 | CCACAAAUAAGUUACAUCU | 489 |
| | | | | | ACAAAC | |
| 53335_5_91 | BCL11a | Exon 5 | − | chr2: 60451552-60451577 | GAUUUUAGAGGGGGGAAAU | 490 |
| | | | | | UAUAGG | |
| 53335_5_92 | BCL11a | Exon 5 | − | chr2: 60451555-60451580 | GCAGAUUUUAGAGGGGGGA | 491 |
| | | | | | AAUUAU | |
| 53335_5_93 | BCL11a | Exon 5 | − | chr2: 60451565-60451590 | GAAAUUUGGGGCAGAUUUU | 492 |
| | | | | | AGAGGG | |
| 53335_5_94 | BCL11a | Exon 5 | − | chr2: 60451566-60451591 | GGAAAUUUGGGGCAGAUUU | 493 |
| | | | | | UAGAGG | |
| 53335_5_95 | BCL11a | Exon 5 | − | chr2: 60451567-60451592 | AGGAAAUUUGGGGCAGAUU | 494 |
| | | | | | UUAGAG | |
| 53335_5_96 | BCL11a | Exon 5 | − | chr2: 60451568-60451593 | CAGGAAAUUUGGGGCAGAU | 495 |
| | | | | | UUUAGA | |
| 53335_5_97 | BCL11a | Exon 5 | − | chr2: 60451569-60451594 | UCAGGAAAUUUGGGGCAGA | 496 |
| | | | | | UUUUAG | |
| 53335_5_98 | BCL11a | Exon 5 | − | chr2: 60451582-60451607 | UUUAGUACUUACAUCAGGA | 497 |
| | | | | | AAUUUG | |
| 53335_5_99 | BCL11a | Exon 5 | − | chr2: 60451583-60451608 | CUUUAGUACUUACAUCAGG | 498 |
| | | | | | AAAUUU | |
| 53335_5_100 | BCL11a | Exon 5 | − | chr2: 60451584-60451609 | UCUUUAGUACUUACAUCAG | 499 |
| | | | | | GAAAUU | |
| 53335_5_101 | BCL11a | Exon 5 | − | chr2: 60451592-60451617 | AUAAAACUUCUUUAGUACU | 500 |
| | | | | | UACAUC | |
| 53335_5_102 | BCL11a | Exon 5 | − | chr2: 60451648-60451673 | UCUAAUUUUAGGUUCCCAA | 501 |
| | | | | | ACCUUC | |
| 53335_5_103 | BCL11a | Exon 5 | − | chr2: 60451664-60451689 | GUUUCUUAUUAAAUAUUCU | 502 |
| | | | | | AAUUUU | |
| 53335_5_104 | BCL11a | Exon 5 | − | chr2: 60451707-60451732 | CUGGGCGAGCGGUAAAUCC | 503 |
| | | | | | UAAAGA | |
| 53335_5_105 | BCL11a | Exon 5 | − | chr2: 60451723-60451748 | UUAGGAAAGAACAUCACUG | 504 |
| | | | | | GGCGAG | |
| 53335_5_106 | BCL11a | Exon 5 | − | chr2: 60451730-60451755 | AUUUAGCUUAGGAAAGAAC | 505 |
| | | | | | AUCACU | |
| 53335_5_107 | BCL11a | Exon 5 | − | chr2: 60451731-60451756 | AAUUUAGCUUAGGAAAGAA | 506 |
| | | | | | CAUCAC | |
| 53335_5_108 | BCL11a | Exon 5 | − | chr2: 60451746-60451771 | UUGAAUUUGUCUUUUAAUU | 507 |
| | | | | | UAGCUU | |
| 53335_5_109 | BCL11a | Exon 5 | − | chr2: 60451776-60451801 | UAUAUGCUUUUGGUGGCUA | 508 |
| | | | | | CCAUGC | |
| 53335_5_110 | BCL11a | Exon 5 | − | chr2: 60451788-60451813 | CUGUUUUUCAAAUAUAUGC | 509 |
| | | | | | UUUUGG | |
| 53335_5_111 | BCL11a | Exon 5 | − | chr2: 60451791-60451816 | AUCCUGUUUUUCAAAUAUA | 510 |
| | | | | | UGCUUU | |
| 53335_5_112 | BCL11a | Exon 5 | − | chr2: 60451827-60451852 | GCAUACCAUUAAAUAAUGC | 511 |
| | | | | | AUAAUA | |
| 53335_5_113 | BCL11a | Exon 5 | − | chr2: 60451882-60451907 | AUUGCUGUUUAUUAAUGCU | 512 |
| | | | | | GAAGUG | |
| 53335_5_114 | BCL11a | Exon 5 | − | chr2: 60451949-60451974 | CAAGGAGAAUCAAAAUGCA | 513 |
| | | | | | AAACUU | |
| 53335_5_115 | BCL11a | Exon 5 | − | chr2: 60451950-60451975 | UCAAGGAGAAUCAAAAUGC | 514 |
| | | | | | AAAACU | |
| 53335_5_116 | BCL11a | Exon 5 | − | chr2: 60451972-60451997 | GCUUAUCAGAUGGCAUAAA | 515 |
| | | | | | UUUUCA | |
| 53335_5_117 | BCL11a | Exon 5 | − | chr2: 60451987-60452012 | GGGAACUAGGUUACCGCUU | 516 |
| | | | | | AUCAGA | |
| 53335_5_118 | BCL11a | Exon 5 | − | chr2: 60452005-60452030 | GGGCAGGAGAUGUAGGAGG | 517 |
| | | | | | GGAACU | |
| 53335_5_119 | BCL11a | Exon 5 | − | chr2: 60452012-60452037 | GAGAAAUGGGCAGGAGAUG | 518 |
| | | | | | UAGGAG | |
| 53335_5_120 | BCL11a | Exon 5 | − | chr2: 60452013-60452038 | UGAGAAAUGGGCAGGAGAU | 519 |
| | | | | | GUAGGA | |
| 53335_5_121 | BCL11a | Exon 5 | − | chr2: 60452014-60452039 | UUGAGAAAUGGGCAGGAGA | 520 |
| | | | | | UGUAGG | |
| 53335_5_122 | BCL11a | Exon 5 | − | chr2: 60452017-60452042 | GAUUUGAGAAAUGGGCAGG | 521 |
| | | | | | AGAUGU | |
| 53335_5_123 | BCL11a | Exon 5 | − | chr2: 60452026-60452051 | GGAGGAACAGAUUUGAGAA | 522 |
| | | | | | AUGGGC | |
| 53335_5_124 | BCL11a | Exon 5 | − | chr2: 60452030-60452055 | GGUAGGAGGAACAGAUUUG | 523 |
| | | | | | AGAAAU | |
| 53335_5_125 | BCL11a | Exon 5 | − | chr2: 60452031-60452056 | GGGUAGGAGGAACAGAUUU | 524 |
| | | | | | GAGAAA | |
| 53335_5_126 | BCL11a | Exon 5 | − | chr2: 60452049-60452074 | UACAGACACCCAUCGGGUG | 525 |
| | | | | | GGUAGG | |
| 53335_5_127 | BCL11a | Exon 5 | − | chr2: 60452052-60452077 | UCCUACAGACACCCAUCGG | 526 |
| | | | | | GUGGGU | |
| 53335_5_128 | BCL11a | Exon 5 | − | chr2: 60452056-60452081 | UGUUUCCUACAGACACCCA | 527 |
| | | | | | UCGGGU | |
| 53335_5_129 | BCL11a | Exon 5 | − | chr2: 60452057-60452082 | CUGUUUCCUACAGACACCC | 528 |
| | | | | | AUCGGG | |
| 53335_5_130 | BCL11a | Exon 5 | − | chr2: 60452060-60452085 | UACCUGUUUCCUACAGACA | 529 |
| | | | | | CCCAUC | |
| 53335_5_131 | BCL11a | Exon 5 | − | chr2: 60452061-60452086 | GUACCUGUUUCCUACAGAC | 530 |
| | | | | | ACCCAU | |
| 53335_5_132 | BCL11a | Exon 5 | − | chr2: 60452111-60452136 | AAUUUUUAAUGCUUAUAAG | 531 |
| | | | | | ACAAUG | |
| 53335_5_133 | BCL11a | Exon 5 | − | chr2: 60452155-60452180 | ACACAAUAAAUGUUGGAGC | 532 |
| | | | | | UUUAGG | |
| 53335_5_134 | BCL11a | Exon 5 | − | chr2: 60452158-60452183 | UUGACACAAUAAAUGUUGG | 533 |
| | | | | | AGCUUU | |
| 53335_5_135 | BCL11a | Exon 5 | − | chr2: 60452167-60452192 | UGCUUAACAUUGACACAAU | 534 |
| | | | | | AAAUGU | |
| 53335_5_136 | BCL11a | Exon 5 | − | chr2: 60452256-60452281 | CCAGCCAACCUAAUUACCU | 535 |
| | | | | | GUAUUG | |
| 53335_5_137 | BCL11a | Exon 5 | − | chr2: 60452295-60452320 | ACCAUCGCUGUCAUGAGUG | 536 |
| | | | | | AUGCCC | |
| 53335_5_138 | BCL11a | Exon 5 | − | chr2: 60452323-60452348 | GAAUCAGUCCCAUAGAGAG | 537 |
| | | | | | GGCCCG | |
| 53335_5_139 | BCL11a | Exon 5 | − | chr2: 60452330-60452355 | GAACAGUGAAUCAGUCCCA | 538 |
| | | | | | UAGAGA | |
| 53335_5_140 | BCL11a | Exon 5 | − | chr2: 60452331-60452356 | GGAACAGUGAAUCAGUCCC | 539 |
| | | | | | AUAGAG | |
| 53335_5_141 | BCL11a | Exon 5 | − | chr2: 60452357-60452382 | UAAAAACAAAAAAACAGAC | 540 |
| | | | | | CCACAU | |
| 53335_5_142 | BCL11a | Exon 5 | − | chr2: 60452423-60452448 | GAGUCCUGCAGAGUCCUUC | 541 |
| | | | | | CAGCCU | |
| 53335_5_143 | BCL11a | Exon 5 | − | chr2: 60452517-60452542 | GCGUGCCGCCCAGUCGACG | 542 |
| | | | | | UCAGCG | |
| 53335_5_144 | BCL11a | Exon 5 | − | chr2: 60452547-60452572 | AAAUUUGAAGCCCCCAGGG | 543 |
| | | | | | GUGGGG | |
| 53335_5_145 | BCL11a | Exon 5 | − | chr2: 60452550-60452575 | AGAAAAUUUGAAGCCCCCA | 544 |
| | | | | | GGGGUG | |
| 53335_5_146 | BCL11a | Exon 5 | − | chr2: 60452551-60452576 | GAGAAAAUUUGAAGCCCCC | 545 |
| | | | | | AGGGGU | |
| 53335_5_147 | BCL11a | Exon 5 | − | chr2: 60452552-60452577 | UGAGAAAAUUUGAAGCCCC | 546 |
| | | | | | CAGGGG | |
| 53335_5_148 | BCL11a | Exon 5 | − | chr2: 60452555-60452580 | UUCUGAGAAAAUUUGAAGC | 547 |
| | | | | | CCCCAG | |
| 53335_5_149 | BCL11a | Exon 5 | − | chr2: 60452556-60452581 | GUUCUGAGAAAAUUUGAAG | 548 |
| | | | | | CCCCCA | |
| 53335_5_150 | BCL11a | Exon 5 | − | chr2: 60452557-60452582 | AGUUCUGAGAAAAUUUGAA | 549 |
| | | | | | GCCCCC | |
| 53335_5_151 | BCL11a | Exon 5 | − | chr2: 60452602-60452627 | CUCAAGAUGUGUGGCAGUU | 550 |
| | | | | | UUCGGA | |
| 53335_5_152 | BCL11a | Exon 5 | − | chr2: 60452606-60452631 | AGAGCUCAAGAUGUGUGGC | 551 |
| | | | | | AGUUUU | |
| 53335_5_153 | BCL11a | Exon 5 | − | chr2: 60452616-60452641 | UAGUACCCAGAGAGCUCAA | 552 |
| | | | | | GAUGUG | |
| 53335_5_154 | BCL11a | Exon 5 | − | chr2: 60452646-60452671 | UCUAGGUUCUUCACACACC | 553 |
| | | | | | CCCAUU | |
| 53335_4_1 | BCL11a | Exon 4 | + | chr2: 60457199-60457224 | UUAAUUUUUUUUAUUUUUU | 554 |
| | | | | | CAAUAA | |
| 53335_4_2 | BCL11a | Exon 4 | + | chr2: 60457200-60457225 | UAAUUUUUUUUAUUUUUUC | 555 |
| | | | | | AAUAAA | |
| 53335_4_3 | BCL11a | Exon 4 | + | chr2: 60457209-60457234 | UUAUUUUUUCAAUAAAGGG | 556 |
| | | | | | ACAAAA | |
| 53335_4_4 | BCL11a | Exon 4 | + | chr2: 60457210-60457235 | UAUUUUUUCAAUAAAGGGA | 557 |
| | | | | | CAAAAU | |
| 53335_4_5 | BCL11a | Exon 4 | + | chr2: 60457222-60457247 | AAAGGGACAAAAUGGGUGU | 558 |
| | | | | | AUGAAC | |
| 53335_4_6 | BCL11a | Exon 4 | + | chr2: 60457259-60457284 | ACAACUGCCAAAAAAACAC | 559 |
| | | | | | AGACAG | |
| 53335_4_7 | BCL11a | Exon 4 | + | chr2: 60457312-60457337 | CCAGAAACAAAUACAAUAA | 560 |
| | | | | | AAAGCC | |
| 53335_4_8 | BCL11a | Exon 4 | + | chr2: 60457328-60457353 | UAAAAAGCCAGGUUGUAAU | 561 |
| | | | | | GACCUU | |
| 53335_4_9 | BCL11a | Exon 4 | + | chr2: 60457401-60457426 | CAAAUUAAGUGCCUCUGUU | 562 |
| | | | | | UUGAAC | |
| 53335_4_10 | BCL11a | Exon 4 | + | chr2: 60457402-60457427 | AAAUUAAGUGCCUCUGUUU | 563 |
| | | | | | UGAACA | |
| 53335_4_11 | BCL11a | Exon 4 | + | chr2: 60457480-60457505 | AGUUACGACAAACAGCUUU | 564 |
| | | | | | CAUUAC | |
| 53335_4_12 | BCL11a | Exon 4 | + | chr2: 60457491-60457516 | ACAGCUUUCAUUACAGGAA | 565 |
| | | | | | UAGAAA | |
| 53335_4_13 | BCL11a | Exon 4 | + | chr2: 60457545-60457570 | AUUUACAAAAAAGUAUUGA | 566 |
| | | | | | CUAAAG | |
| 53335_4_14 | BCL11a | Exon 4 | + | chr2: 60457546-60457571 | UUUACAAAAAAGUAUUGAC | 567 |
| | | | | | UAAAGC | |
| 53335_4_15 | BCL11a | Exon 4 | + | chr2: 60457616-60457641 | UAAAUAUAAAGCACCAUUU | 568 |
| | | | | | AGUUUU | |
| 53335_4_16 | BCL11a | Exon 4 | + | chr2: 60457642-60457667 | GGCAAUGAAAAAAACUGCA | 569 |
| | | | | | AAACAU | |
| 53335_4_17 | BCL11a | Exon 4 | + | chr2: 60457695-60457720 | UCUUUCUUUCUUUUACUGC | 570 |
| | | | | | AUAUGA | |
| 53335_4_18 | BCL11a | Exon 4 | + | chr2: 60457706-60457731 | UUUACUGCAUAUGAAGGUA | 571 |
| | | | | | AGAUGC | |
| 53335_4_19 | BCL11a | Exon 4 | + | chr2: 60457714-60457739 | AUAUGAAGGUAAGAUGCUG | 572 |
| | | | | | GAAUGU | |
| 53335_4_20 | BCL11a | Exon 4 | + | chr2: 60457715-60457740 | UAUGAAGGUAAGAUGCUGG | 573 |
| | | | | | AAUGUA | |
| 53335_4_21 | BCL11a | Exon 4 | + | chr2: 60457725-60457750 | AGAUGCUGGAAUGUAGGGU | 574 |
| | | | | | GAUAGA | |
| 53335_4_22 | BCL11a | Exon 4 | + | chr2: 60457730-60457755 | CUGGAAUGUAGGGUGAUAG | 575 |
| | | | | | AAGGAA | |
| 53335_4_23 | BCL11a | Exon 4 | + | chr2: 60457731-60457756 | UGGAAUGUAGGGUGAUAGA | 576 |
| | | | | | AGGAAA | |
| 53335_4_24 | BCL11a | Exon 4 | + | chr2: 60457792-60457817 | UUAGCUUGCAGUACUGCAU | 577 |
| | | | | | ACAGUA | |
| 53335_4_25 | BCL11a | Exon 4 | + | chr2: 60457799-60457824 | GCAGUACUGCAUACAGUAU | 578 |
| | | | | | GGCAGC | |
| 53335_4_26 | BCL11a | Exon 4 | + | chr2: 60457806-60457831 | UGCAUACAGUAUGGCAGCA | 579 |
| | | | | | GGAAAA | |
| 53335_4_27 | BCL11a | Exon 4 | + | chr2: 60457817-60457842 | UGGCAGCAGGAAAAAGGAA | 580 |
| | | | | | CAAAAA | |
| 53335_4_28 | BCL11a | Exon 4 | + | chr2: 60457863-60457888 | ACAGCCAUCCAUGUGACAU | 581 |
| | | | | | UCUAGC | |
| 53335_4_29 | BCL11a | Exon 4 | + | chr2: 60457887-60457912 | CAGGCUCCCCCAAACCGCC | 582 |
| | | | | | AUUAUA | |
| 53335_4_30 | BCL11a | Exon 4 | + | chr2: 60457996-60458021 | CCUGCCAAAUUAAAAAAAU | 583 |
| | | | | | AUACUG | |
| 53335_4_31 | BCL11a | Exon 4 | + | chr2: 60458031-60458056 | UCUUUUUUUUUUCCACUAC | 584 |
| | | | | | CAAAAA | |
| 53335_4_32 | BCL11a | Exon 4 | + | chr2: 60458178-60458203 | AAAGACCAUAAAUGUAUUU | 585 |
| | | | | | UAGCAU | |
| 53335_4_33 | BCL11a | Exon 4 | + | chr2: 60458274-60458299 | UUUUUUUUUUUUACAACCU | 586 |
| | | | | | GAAGAG | |
| 53335_4_34 | BCL11a | Exon 4 | + | chr2: 60458287-60458312 | CAACCUGAAGAGCGGUGUG | 587 |
| | | | | | UAUCCA | |
| 53335_4_35 | BCL11a | Exon 4 | + | chr2: 60458317-60458342 | UAGAAUUUCCACUACCAUU | 588 |
| | | | | | UUUAAA | |
| 53335_4_36 | BCL11a | Exon 4 | + | chr2: 60458350-60458375 | AAGUCUUGUAACACCACCA | 589 |
| | | | | | AGACAA | |
| 53335_4_37 | BCL11a | Exon 4 | + | chr2: 60458564-60458589 | UAAGUAAGCUCAAUAGUCA | 590 |
| | | | | | AGUAAA | |
| 53335_4_38 | BCL11a | Exon 4 | + | chr2: 60458568-60458593 | UAAGCUCAAUAGUCAAGUA | 591 |
| | | | | | AAUGGC | |
| 53335_4_39 | BCL11a | Exon 4 | + | chr2: 60458677-60458702 | UUCCCUUAAGUAUAGACCU | 592 |
| | | | | | GUAAAC | |
| 53335_4_40 | BCL11a | Exon 4 | + | chr2: 60458678-60458703 | UCCCUUAAGUAUAGACCUG | 593 |
| | | | | | UAAACU | |
| 53335_4_41 | BCL11a | Exon 4 | + | chr2: 60458717-60458742 | GUGCACUUAAUUGUCCUAU | 594 |
| | | | | | CUGAGC | |
| 53335_4_42 | BCL11a | Exon 4 | + | chr2: 60458775-60458800 | AUUAGAGAAAAGAUACAGA | 595 |
| | | | | | UAUCAC | |
| 53335_4_43 | BCL11a | Exon 4 | + | chr2: 60458806-60458831 | AGUCAAGUGCUAUUUGAAC | 596 |
| | | | | | ACCAAC | |
| 53335_4_44 | BCL11a | Exon 4 | + | chr2: 60458807-60458832 | GUCAAGUGCUAUUUGAACA | 597 |
| | | | | | CCAACU | |
| 53335_4_45 | BCL11a | Exon 4 | + | chr2: 60458808-60458833 | UCAAGUGCUAUUUGAACAC | 598 |
| | | | | | CAACUG | |
| 53335_4_46 | BCL11a | Exon 4 | + | chr2: 60458904-60458929 | GUUAACACAAAUAGCACAC | 599 |
| | | | | | AGUGUA | |
| 53335_4_47 | BCL11a | Exon 4 | + | chr2: 60458930-60458955 | GGAAAAGAAAUGAAGUACA | 600 |
| | | | | | ACUUUU | |
| 53335_4_48 | BCL11a | Exon 4 | + | chr2: 60458931-60458956 | GAAAAGAAAUGAAGUACAA | 601 |
| | | | | | CUUUUA | |
| 53335_4_49 | BCL11a | Exon 4 | + | chr2: 60459074-60459099 | CUUAUAUACCUGUUCUAGU | 602 |
| | | | | | UUUAAA | |
| 53335_4_50 | BCL11a | Exon 4 | + | chr2: 60459165-60459190 | UAUUGUCAGCCUCUUCCUU | 603 |
| | | | | | UCAAUA | |
| 53335_4_51 | BCL11a | Exon 4 | + | chr2: 60459174-60459199 | CCUCUUCCUUUCAAUAUGG | 604 |
| | | | | | UAUACA | |
| 53335_4_52 | BCL11a | Exon 4 | + | chr2: 60459223-60459248 | UGUCCACUUGACAACCAAG | 605 |
| | | | | | UAGAUC | |
| 53335_4_53 | BCL11a | Exon 4 | + | chr2: 60459238-60459263 | CAAGUAGAUCUGGAUCUAU | 606 |
| | | | | | UUCUUU | |
| 53335_4_54 | BCL11a | Exon 4 | + | chr2: 60459322-60459347 | UUACUAGUGUAUUUAAUUG | 607 |
| | | | | | CGUUCC | |
| 53335_4_55 | BCL11a | Exon 4 | + | chr2: 60459323-60459348 | UACUAGUGUAUUUAAUUGC | 608 |
| | | | | | GUUCCA | |
| 53335_4_56 | BCL11a | Exon 4 | + | chr2: 60459378-60459403 | UCAUUGUUUAAAAAAAAUA | 609 |
| | | | | | AAACUU | |
| 53335_4_57 | BCL11a | Exon 4 | + | chr2: 60459379-60459404 | CAUUGUUUAAAAAAAAUAA | 610 |
| | | | | | AACUUU | |
| 53335_4_58 | BCL11a | Exon 4 | + | chr2: 60459413-60459438 | AGCCCAUUUCUUUUAAGCU | 611 |
| | | | | | CUCACC | |
| 53335_4_59 | BCL11a | Exon 4 | + | chr2: 60459435-60459460 | ACCAGGAGCAAAGUAGCUU | 612 |
| | | | | | UUAUAC | |
| 53335_4_60 | BCL11a | Exon 4 | + | chr2: 60459470-60459495 | AGUUUUGUUUAUAAAAUUA | 613 |
| | | | | | AACUAA | |
| 53335_4_61 | BCL11a | Exon 4 | + | chr2: 60459490-60459515 | ACUAAAGGAAAAAUGAUGA | 614 |
| | | | | | UUAACU | |
| 53335_4_62 | BCL11a | Exon 4 | + | chr2: 60459499-60459524 | AAAAUGAUGAUUAACUAGG | 615 |
| | | | | | ACAUAA | |
| 53335_4_63 | BCL11a | Exon 4 | + | chr2: 60459500-60459525 | AAAUGAUGAUUAACUAGGA | 616 |
| | | | | | CAUAAU | |
| 53335_4_64 | BCL11a | Exon 4 | + | chr2: 60459513-60459538 | CUAGGACAUAAUGGGUCAU | 617 |
| | | | | | CUUUUU | |
| 53335_4_65 | BCL11a | Exon 4 | + | chr2: 60459564-60459589 | AUAUAGAAUUAUAUGCUAG | 618 |
| | | | | | UUCCUA | |
| 53335_4_66 | BCL11a | Exon 4 | + | chr2: 60459632-60459657 | UAACAAGUAGAAAGAACCA | 619 |
| | | | | | UCGAUG | |
| 53335_4_67 | BCL11a | Exon 4 | + | chr2: 60459649-60459674 | CAUCGAUGUGGUUUUAAUA | 620 |
| | | | | | GAUCCA | |
| 53335_4_68 | BCL11a | Exon 4 | + | chr2: 60459718-60459743 | GUUUUUCUGUUAAUUUGUC | 621 |
| | | | | | AAUUCA | |
| 53335_4_69 | BCL11a | Exon 4 | + | chr2: 60459818-60459843 | UCAGUGCUAUCUAUUCUGU | 622 |
| | | | | | CUAUAG | |
| 53335_4_70 | BCL11a | Exon 4 | + | chr2: 60459819-60459844 | CAGUGCUAUCUAUUCUGUC | 623 |
| | | | | | UAUAGA | |
| 53335_4_71 | BCL11a | Exon 4 | + | chr2: 60459900-60459925 | UAUGUAUUACAGAAUGUAU | 624 |
| | | | | | GCAGCA | |
| 53335_4_72 | BCL11a | Exon 4 | + | chr2: 60459937-60459962 | CUCUCUCUCUCUUUUUCUC | 625 |
| | | | | | UCAGAA | |
| 53335_4_73 | BCL11a | Exon 4 | + | chr2: 60459943-60459968 | CUCUCUUUUUCUCUCAGAA | 626 |
| | | | | | CGGAAC | |
| 53335_4_74 | BCL11a | Exon 4 | + | chr2: 60459977-60460002 | CAACAUGUUUGCUCAGCAA | 627 |
| | | | | | CGAAUU | |
| 53335_4_75 | BCL11a | Exon 4 | + | chr2: 60459978-60460003 | AACAUGUUUGCUCAGCAAC | 628 |
| | | | | | GAAUUA | |
| 53335_4_76 | BCL11a | Exon 4 | + | chr2: 60460068-60460093 | ACAUGUAAAUUAUUGCACA | 629 |
| | | | | | AGAGAA | |
| 53335_4_77 | BCL11a | Exon 4 | + | chr2: 60460126-60460151 | GCCCCAUACAGAUCAUGCA | 630 |
| | | | | | UUCAAA | |
| 53335_4_78 | BCL11a | Exon 4 | + | chr2: 60460140-60460165 | AUGCAUUCAAACGGUGAGA | 631 |
| | | | | | ACAUAA | |
| 53335_4_79 | BCL11a | Exon 4 | + | chr2: 60460193-60460218 | AAAGAAAAAGAAAAAGAAA | 632 |
| | | | | | AAAAAC | |
| 53335_4_80 | BCL11a | Exon 4 | + | chr2: 60460201-60460226 | AGAAAAAGAAAAAAAACAG | 633 |
| | | | | | GUGUGC | |
| 53335_4_81 | BCL11a | Exon 4 | + | chr2: 60460269-60460294 | UGUUUGUUUGUUUGUUUAA | 634 |
| | | | | | AUCACA | |
| 53335_4_82 | BCL11a | Exon 4 | + | chr2: 60460270-60460295 | GUUUGUUUGUUUGUUUAAA | 635 |
| | | | | | UCACAU | |
| 53335_4_83 | BCL11a | Exon 4 | + | chr2: 60460291-60460316 | ACAUGGGACUAGAAAAAAA | 636 |
| | | | | | UCCUAC | |
| 53335_4_84 | BCL11a | Exon 4 | + | chr2: 60460292-60460317 | CAUGGGACUAGAAAAAAAU | 637 |
| | | | | | CCUACA | |
| 53335_4_85 | BCL11a | Exon 4 | + | chr2: 60460297-60460322 | GACUAGAAAAAAAUCCUAC | 638 |
| | | | | | AGGGAG | |
| 53335_4_86 | BCL11a | Exon 4 | + | chr2: 60460298-60460323 | ACUAGAAAAAAAUCCUACA | 639 |
| | | | | | GGGAGU | |
| 53335_4_87 | BCL11a | Exon 4 | + | chr2: 60460299-60460324 | CUAGAAAAAAAUCCUACAG | 640 |
| | | | | | GGAGUG | |
| 53335_4_88 | BCL11a | Exon 4 | + | chr2: 60460303-60460328 | AAAAAAAUCCUACAGGGAG | 641 |
| | | | | | UGGGGC | |
| 53335_4_89 | BCL11a | Exon 4 | + | chr2: 60460306-60460331 | AAAAUCCUACAGGGAGUGG | 642 |
| | | | | | GGCUGG | |
| 53335_4_90 | BCL11a | Exon 4 | + | chr2: 60460307-60460332 | AAAUCCUACAGGGAGUGGG | 643 |
| | | | | | GCUGGA | |
| 53335_4_91 | BCL11a | Exon 4 | + | chr2: 60460313-60460338 | UACAGGGAGUGGGGCUGGA | 644 |
| | | | | | GGGCGA | |
| 53335_4_92 | BCL11a | Exon 4 | + | chr2: 60460314-60460339 | ACAGGGAGUGGGGCUGGAG | 645 |
| | | | | | GGCGAU | |
| 53335_4_93 | BCL11a | Exon 4 | + | chr2: 60460315-60460340 | CAGGGAGUGGGGCUGGAGG | 646 |
| | | | | | GCGAUG | |
| 53335_4_94 | BCL11a | Exon 4 | + | chr2: 60460319-60460344 | GAGUGGGGCUGGAGGGCGA | 647 |
| | | | | | UGGGGA | |
| 53335_4_95 | BCL11a | Exon 4 | + | chr2: 60460320-60460345 | AGUGGGGCUGGAGGGCGAU | 648 |
| | | | | | GGGGAA | |
| 53335_4_96 | BCL11a | Exon 4 | + | chr2: 60460321-60460346 | GUGGGGCUGGAGGGCGAUG | 649 |
| | | | | | GGGAAG | |
| 53335_4_97 | BCL11a | Exon 4 | + | chr2: 60460326-60460351 | GCUGGAGGGCGAUGGGGAA | 650 |
| | | | | | GGGGAG | |
| 53335_4_98 | BCL11a | Exon 4 | + | chr2: 60460335-60460360 | CGAUGGGGAAGGGGAGUGG | 651 |
| | | | | | UGAAAA | |
| 53335_4_99 | BCL11a | Exon 4 | + | chr2: 60460336-60460361 | GAUGGGGAAGGGGAGUGGU | 652 |
| | | | | | GAAAAA | |
| 53335_4_100 | BCL11a | Exon 4 | + | chr2: 60460337-60460362 | AUGGGGAAGGGGAGUGGUG | 653 |
| | | | | | AAAAAG | |
| 53335_4_101 | BCL11a | Exon 4 | + | chr2: 60460338-60460363 | UGGGGAAGGGGAGUGGUGA | 654 |
| | | | | | AAAAGG | |
| 53335_4_102 | BCL11a | Exon 4 | + | chr2: 60460345-60460370 | GGGGAGUGGUGAAAAAGGG | 655 |
| | | | | | GGUGUC | |
| 53335_4_103 | BCL11a | Exon 4 | + | chr2: 60460348-60460373 | GAGUGGUGAAAAAGGGGGU | 656 |
| | | | | | GUCAGG | |
| 53335_4_104 | BCL11a | Exon 4 | + | chr2: 60460349-60460374 | AGUGGUGAAAAAGGGGGUG | 657 |
| | | | | | UCAGGU | |
| 53335_4_105 | BCL11a | Exon 4 | + | chr2: 60460356-60460381 | AAAAAGGGGGUGUCAGGUG | 658 |
| | | | | | GGAGUG | |
| 53335_4_106 | BCL11a | Exon 4 | + | chr2: 60460357-60460382 | AAAAGGGGGUGUCAGGUGG | 659 |
| | | | | | GAGUGA | |
| 53335_4_107 | BCL11a | Exon 4 | + | chr2: 60460360-60460385 | AGGGGGUGUCAGGUGGGAG | 660 |
| | | | | | UGAGGG | |
| 53335_4_108 | BCL11a | Exon 4 | + | chr2: 60460361-60460386 | GGGGGUGUCAGGUGGGAGU | 661 |
| | | | | | GAGGGA | |
| 53335_4_109 | BCL11a | Exon 4 | + | chr2: 60460362-60460387 | GGGGUGUCAGGUGGGAGUG | 662 |
| | | | | | AGGGAG | |
| 53335_4_110 | BCL11a | Exon 4 | + | chr2: 60460442-60460467 | GUGCCAUUUUUUCAUGUGU | 663 |
| | | | | | UUCUCC | |
| 53335_4_111 | BCL11a | Exon 4 | + | chr2: 60460443-60460468 | UGCCAUUUUUUCAUGUGUU | 664 |
| | | | | | UCUCCA | |
| 53335_4_112 | BCL11a | Exon 4 | + | chr2: 60460462-60460487 | UCUCCAGGGUACUGUACAC | 665 |
| | | | | | GCUAAA | |
| 53335_4_113 | BCL11a | Exon 4 | + | chr2: 60460505-60460530 | ACAUUUGUAAACGUCCUUC | 666 |
| | | | | | CCCACC | |
| 53335_4_114 | BCL11a | Exon 4 | + | chr2: 60460527-60460552 | ACCUGGCCAUGCGUUUUCA | 667 |
| | | | | | UGUGCC | |
| 53335_4_115 | BCL11a | Exon 4 | + | chr2: 60460544-60460569 | CAUGUGCCUGGUGAGCUUG | 668 |
| | | | | | CUACUC | |
| 53335_4_116 | BCL11a | Exon 4 | + | chr2: 60460545-60460570 | AUGUGCCUGGUGAGCUUGC | 669 |
| | | | | | UACUCU | |
| 53335_4_117 | BCL11a | Exon 4 | + | chr2: 60460551-60460576 | CUGGUGAGCUUGCUACUCU | 670 |
| | | | | | GGGCAC | |
| 53335_4_118 | BCL11a | Exon 4 | + | chr2: 60460579-60460604 | CAUAGUUGCACAGCUCGCA | 671 |
| | | | | | UUUAUA | |
| 53335_4_119 | BCL11a | Exon 4 | + | chr2: 60460595-60460620 | GCAUUUAUAAGGCCUUUCG | 672 |
| | | | | | CCCGUG | |
| 53335_4_120 | BCL11a | Exon 4 | + | chr2: 60460607-60460632 | CCUUUCGCCCGUGUGGCUU | 673 |
| | | | | | CUCCUG | |
| 53335_4_121 | BCL11a | Exon 4 | + | chr2: 60460686-60460711 | UCGCUGCGUCUGCCCUCUU | 674 |
| | | | | | UUGAGC | |
| 53335_4_122 | BCL11a | Exon 4 | + | chr2: 60460687-60460712 | CGCUGCGUCUGCCCUCUUU | 675 |
| | | | | | UGAGCU | |
| 53335_4_123 | BCL11a | Exon 4 | + | chr2: 60460696-60460721 | UGCCCUCUUUUGAGCUGGG | 676 |
| | | | | | CCUGCC | |
| 53335_4_124 | BCL11a | Exon 4 | + | chr2: 60460697-60460722 | GCCCUCUUUUGAGCUGGGC | 677 |
| | | | | | CUGCCC | |
| 53335_4_125 | BCL11a | Exon 4 | + | chr2: 60460702-60460727 | CUUUUGAGCUGGGCCUGCC | 678 |
| | | | | | CGGGCC | |
| 53335_4_126 | BCL11a | Exon 4 | + | chr2: 60460715-60460740 | CCUGCCCGGGCCCGGACCA | 679 |
| | | | | | CUAAUA | |
| 53335_4_127 | BCL11a | Exon 4 | + | chr2: 60460716-60460741 | CUGCCCGGGCCCGGACCAC | 680 |
| | | | | | UAAUAU | |
| 53335_4_128 | BCL11a | Exon 4 | + | chr2: 60460717-60460742 | UGCCCGGGCCCGGACCACU | 681 |
| | | | | | AAUAUG | |
| 53335_4_129 | BCL11a | Exon 4 | + | chr2: 60460776-60460801 | CCCGAGAUCCCUCCGUCCA | 682 |
| | | | | | GCUCCC | |
| 53335_4_130 | BCL11a | Exon 4 | + | chr2: 60460777-60460802 | CCGAGAUCCCUCCGUCCAG | 683 |
| | | | | | CUCCCC | |
| 53335_4_131 | BCL11a | Exon 4 | + | chr2: 60460780-60460805 | AGAUCCCUCCGUCCAGCUC | 684 |
| | | | | | CCCGGG | |
| 53335_4_132 | BCL11a | Exon 4 | + | chr2: 60460785-60460810 | CCUCCGUCCAGCUCCCCGG | 685 |
| | | | | | GCGGUG | |
| 53335_4_133 | BCL11a | Exon 4 | + | chr2: 60460812-60460837 | GAGAAGCGCAAACUCCCGU | 686 |
| | | | | | UCUCCG | |
| 53335_4_134 | BCL11a | Exon 4 | + | chr2: 60460827-60460852 | CCGUUCUCCGAGGAGUGCU | 687 |
| | | | | | CCGACG | |
| 53335_4_135 | BCL11a | Exon 4 | + | chr2: 60460830-60460855 | UUCUCCGAGGAGUGCUCCG | 688 |
| | | | | | ACGAGG | |
| 53335_4_136 | BCL11a | Exon 4 | + | chr2: 60460837-60460862 | AGGAGUGCUCCGACGAGGA | 689 |
| | | | | | GGCAAA | |
| 53335_4_137 | BCL11a | Exon 4 | + | chr2: 60460848-60460873 | GACGAGGAGGCAAAAGGCG | 690 |
| | | | | | AUUGUC | |
| 53335_4_138 | BCL11a | Exon 4 | + | chr2: 60460865-60460890 | CGAUUGUCUGGAGUCUCCG | 691 |
| | | | | | AAGCUA | |
| 53335_4_139 | BCL11a | Exon 4 | + | chr2: 60460869-60460894 | UGUCUGGAGUCUCCGAAGC | 692 |
| | | | | | UAAGGA | |
| 53335_4_140 | BCL11a | Exon 4 | + | chr2: 60460870-60460895 | GUCUGGAGUCUCCGAAGCU | 693 |
| | | | | | AAGGAA | |
| 53335_4_141 | BCL11a | Exon 4 | + | chr2: 60460887-60460912 | CUAAGGAAGGGAUCUUUGA | 694 |
| | | | | | GCUGCC | |
| 53335_4_142 | BCL11a | Exon 4 | + | chr2: 60460890-60460915 | AGGAAGGGAUCUUUGAGCU | 695 |
| | | | | | GCCUGG | |
| 53335_4_143 | BCL11a | Exon 4 | + | chr2: 60460902-60460927 | UUGAGCUGCCUGGAGGCCG | 696 |
| | | | | | CGUAGC | |
| 53335_4_144 | BCL11a | Exon 4 | + | chr2: 60460935-60460960 | CACUGCGAGUACACGUUCU | 697 |
| | | | | | CCGUGU | |
| 53335_4_145 | BCL11a | Exon 4 | + | chr2: 60460936-60460961 | ACUGCGAGUACACGUUCUC | 698 |
| | | | | | CGUGUU | |
| 53335_4_146 | BCL11a | Exon 4 | + | chr2: 60460944-60460969 | UACACGUUCUCCGUGUUGG | 699 |
| | | | | | GCAUCG | |
| 53335_4_147 | BCL11a | Exon 4 | + | chr2: 60460948-60460973 | CGUUCUCCGUGUUGGGCAU | 700 |
| | | | | | CGCGGC | |
| 53335_4_148 | BCL11a | Exon 4 | + | chr2: 60460949-60460974 | GUUCUCCGUGUUGGGCAUC | 701 |
| | | | | | GCGGCC | |
| 53335_4_149 | BCL11a | Exon 4 | + | chr2: 60460950-60460975 | UUCUCCGUGUUGGGCAUCG | 702 |
| | | | | | CGGCCG | |
| 53335_4_150 | BCL11a | Exon 4 | + | chr2: 60460951-60460976 | UCUCCGUGUUGGGCAUCGC | 703 |
| | | | | | GGCCGG | |
| 53335_4_151 | BCL11a | Exon 4 | + | chr2: 60460955-60460980 | CGUGUUGGGCAUCGCGGCC | 704 |
| | | | | | GGGGGC | |
| 53335_4_152 | BCL11a | Exon 4 | + | chr2: 60460992-60461017 | UUCUCGAGCUUGAUGCGCU | 705 |
| | | | | | UAGAGA | |
| 53335_4_153 | BCL11a | Exon 4 | + | chr2: 60460993-60461018 | UCUCGAGCUUGAUGCGCUU | 706 |
| | | | | | AGAGAA | |
| 53335_4_154 | BCL11a | Exon 4 | + | chr2: 60460994-60461019 | CUCGAGCUUGAUGCGCUUA | 707 |
| | | | | | GAGAAG | |
| 53335_4_155 | BCL11a | Exon 4 | + | chr2: 60461007-60461032 | CGCUUAGAGAAGGGGCUCA | 708 |
| | | | | | GCGAGC | |
| 53335_4_156 | BCL11a | Exon 4 | + | chr2: 60461008-60461033 | GCUUAGAGAAGGGGCUCAG | 709 |
| | | | | | CGAGCU | |
| 53335_4_157 | BCL11a | Exon 4 | + | chr2: 60461009-60461034 | CUUAGAGAAGGGGCUCAGC | 710 |
| | | | | | GAGCUG | |
| 53335_4_158 | BCL11a | Exon 4 | + | chr2: 60461031-60461056 | CUGGGGCUGCCCAGCAGCA | 711 |
| | | | | | GCUUUU | |
| 53335_4_159 | BCL11a | Exon 4 | + | chr2: 60461036-60461061 | GCUGCCCAGCAGCAGCUUU | 712 |
| | | | | | UUGGAC | |
| 53335_4_160 | BCL11a | Exon 4 | + | chr2: 60461046-60461071 | AGCAGCUUUUUGGACAGGC | 713 |
| | | | | | CCCCCG | |
| 53335_4_161 | BCL11a | Exon 4 | + | chr2: 60461059-60461084 | ACAGGCCCCCCGAGGCCGA | 714 |
| | | | | | CUCGCC | |
| 53335_4_162 | BCL11a | Exon 4 | + | chr2: 60461060-60461085 | CAGGCCCCCCGAGGCCGAC | 715 |
| | | | | | UCGCCC | |
| 53335_4_163 | BCL11a | Exon 4 | + | chr2: 60461061-60461086 | AGGCCCCCCGAGGCCGACU | 716 |
| | | | | | CGCCCG | |
| 53335_4_164 | BCL11a | Exon 4 | + | chr2: 60461072-60461097 | GGCCGACUCGCCCGGGGAG | 717 |
| | | | | | CAGCCG | |
| 53335_4_165 | BCL11a | Exon 4 | + | chr2: 60461099-60461124 | GCCAUUAACAGUGCCAUCG | 718 |
| | | | | | UCUAUG | |
| 53335_4_166 | BCL11a | Exon 4 | + | chr2: 60461112-60461137 | CCAUCGUCUAUGCGGUCCG | 719 |
| | | | | | ACUCGC | |
| 53335_4_167 | BCL11a | Exon 4 | + | chr2: 60461144-60461169 | CGAGUCUUCGUCGCAAGUG | 720 |
| | | | | | UCCCUG | |
| 53335_4_168 | BCL11a | Exon 4 | + | chr2: 60461151-60461176 | UCGUCGCAAGUGUCCCUGU | 721 |
| | | | | | GGCCCU | |
| 53335_4_169 | BCL11a | Exon 4 | + | chr2: 60461157-60461182 | CAAGUGUCCCUGUGGCCCU | 722 |
| | | | | | CGGCCU | |
| 53335_4_170 | BCL11a | Exon 4 | + | chr2: 60461162-60461187 | GUCCCUGUGGCCCUCGGCC | 723 |
| | | | | | UCGGCC | |
| 53335_4_171 | BCL11a | Exon 4 | + | chr2: 60461165-60461190 | CCUGUGGCCCUCGGCCUCG | 724 |
| | | | | | GCCAGG | |
| 53335_4_172 | BCL11a | Exon 4 | + | chr2: 60461189-60461214 | GUGGCCGCGCUUAUGCUUC | 725 |
| | | | | | UCGCCC | |
| 53335_4_173 | BCL11a | Exon 4 | + | chr2: 60461195-60461220 | GCGCUUAUGCUUCUCGCCC | 726 |
| | | | | | AGGACC | |
| 53335_4_174 | BCL11a | Exon 4 | + | chr2: 60461198-60461223 | CUUAUGCUUCUCGCCCAGG | 727 |
| | | | | | ACCUGG | |
| 53335_4_175 | BCL11a | Exon 4 | + | chr2: 60461202-60461227 | UGCUUCUCGCCCAGGACCU | 728 |
| | | | | | GGUGGA | |
| 53335_4_176 | BCL11a | Exon 4 | + | chr2: 60461223-60461248 | UGGAAGGCCUCGCUGAAGU | 729 |
| | | | | | GCUGCA | |
| 53335_4_177 | BCL11a | Exon 4 | + | chr2: 60461253-60461278 | CUGAGCACCAUGCCCUGCA | 730 |
| | | | | | UGACGU | |
| 53335_4_178 | BCL11a | Exon 4 | + | chr2: 60461254-60461279 | UGAGCACCAUGCCCUGCAU | 731 |
| | | | | | GACGUC | |
| 53335_4_179 | BCL11a | Exon 4 | + | chr2: 60461258-60461283 | CACCAUGCCCUGCAUGACG | 732 |
| | | | | | UCGGGC | |
| 53335_4_180 | BCL11a | Exon 4 | + | chr2: 60461259-60461284 | ACCAUGCCCUGCAUGACGU | 733 |
| | | | | | CGGGCA | |
| 53335_4_181 | BCL11a | Exon 4 | + | chr2: 60461264-60461289 | GCCCUGCAUGACGUCGGGC | 734 |
| | | | | | AGGGCG | |
| 53335_4_182 | BCL11a | Exon 4 | + | chr2: 60461312-60461337 | GACCGCGCCCCGCGAGCUG | 735 |
| | | | | | UUCUCG | |
| 53335_4_183 | BCL11a | Exon 4 | + | chr2: 60461315-60461340 | CGCGCCCCGCGAGCUGUUC | 736 |
| | | | | | UCGUGG | |
| 53335_4_184 | BCL11a | Exon 4 | + | chr2: 60461330-60461355 | GUUCUCGUGGUGGCGCGCC | 737 |
| | | | | | GCCUCC | |
| 53335_4_185 | BCL11a | Exon 4 | + | chr2: 60461446-60461471 | CCUCUUCCUCCUCGUCCCCG | 738 |
| | | | | | UUCUC | |
| 53335_4_186 | BCL11a | Exon 4 | + | chr2: 60461447-60461472 | CUCUUCCUCCUCGUCCCCG | 739 |
| | | | | | UUCUCC | |
| 53335_4_187 | BCL11a | Exon 4 | + | chr2: 60461453-60461478 | CUCCUCGUCCCCGUUCUCC | 740 |
| | | | | | GGGAUC | |
| 53335_4_188 | BCL11a | Exon 4 | + | chr2: 60461457-60461482 | UCGUCCCCGUUCUCCGGGA | 741 |
| | | | | | UCAGGU | |
| 53335_4_189 | BCL11a | Exon 4 | + | chr2: 60461458-60461483 | CGUCCCCGUUCUCCGGGAU | 742 |
| | | | | | CAGGUU | |
| 53335_4_190 | BCL11a | Exon 4 | + | chr2: 60461459-60461484 | GUCCCCGUUCUCCGGGAUC | 743 |
| | | | | | AGGUUG | |
| 53335_4_191 | BCL11a | Exon 4 | + | chr2: 60461481-60461506 | UUGGGGUCGUUCUCGCUCU | 744 |
| | | | | | UGAACU | |
| 53335_4_192 | BCL11a | Exon 4 | + | chr2: 60461490-60461515 | UUCUCGCUCUUGAACUUGG | 745 |
| | | | | | CCACCA | |
| 53335_4_193 | BCL11a | Exon 4 | + | chr2: 60461508-60461533 | GCCACCACGGACUUGAGCG | 746 |
| | | | | | CGCUGC | |
| 53335_4_194 | BCL11a | Exon 4 | + | chr2: 60461529-60461554 | CUGCUGGCGCUGCCCACCA | 747 |
| | | | | | AGUCGC | |
| 53335_4_195 | BCL11a | Exon 4 | + | chr2: 60461535-60461560 | GCGCUGCCCACCAAGUCGC | 748 |
| | | | | | UGGUGC | |
| 53335_4_196 | BCL11a | Exon 4 | + | chr2: 60461536-60461561 | CGCUGCCCACCAAGUCGCU | 749 |
| | | | | | GGUGCC | |
| 53335_4_197 | BCL11a | Exon 4 | + | chr2: 60461542-60461567 | CCACCAAGUCGCUGGUGCC | 750 |
| | | | | | GGGUUC | |
| 53335_4_198 | BCL11a | Exon 4 | + | chr2: 60461543-60461568 | CACCAAGUCGCUGGUGCCG | 751 |
| | | | | | GGUUCC | |
| 53335_4_199 | BCL11a | Exon 4 | + | chr2: 60461544-60461569 | ACCAAGUCGCUGGUGCCGG | 752 |
| | | | | | GUUCCG | |
| 53335_4_200 | BCL11a | Exon 4 | + | chr2: 60461550-60461575 | UCGCUGGUGCCGGGUUCCG | 753 |
| | | | | | GGGAGC | |
| 53335_4_201 | BCL11a | Exon 4 | + | chr2: 60461553-60461578 | CUGGUGCCGGGUUCCGGGG | 754 |
| | | | | | AGCUGG | |
| 53335_4_202 | BCL11a | Exon 4 | + | chr2: 60461556-60461581 | GUGCCGGGUUCCGGGGAGC | 755 |
| | | | | | UGGCGG | |
| 53335_4_203 | BCL11a | Exon 4 | + | chr2: 60461571-60461596 | GAGCUGGCGGUGGAGAGAC | 756 |
| | | | | | CGUCGU | |
| 53335_4_204 | BCL11a | Exon 4 | + | chr2: 60461586-60461611 | AGACCGUCGUCGGACUUGA | 757 |
| | | | | | CCGUCA | |
| 53335_4_205 | BCL11a | Exon 4 | + | chr2: 60461587-60461612 | GACCGUCGUCGGACUUGAC | 758 |
| | | | | | CGUCAU | |
| 53335_4_206 | BCL11a | Exon 4 | + | chr2: 60461588-60461613 | ACCGUCGUCGGACUUGACC | 759 |
| | | | | | GUCAUG | |
| 53335_4_207 | BCL11a | Exon 4 | + | chr2: 60461589-60461614 | CCGUCGUCGGACUUGACCG | 760 |
| | | | | | UCAUGG | |
| 53335_4_208 | BCL11a | Exon 4 | + | chr2: 60461618-60461643 | CGAUUUGUGCAUGUGCGUC | 761 |
| | | | | | UUCAUG | |
| 53335_4_209 | BCL11a | Exon 4 | + | chr2: 60461634-60461659 | GUCUUCAUGUGGCGCUUCA | 762 |
| | | | | | GCUUGC | |
| 53335_4_210 | BCL11a | Exon 4 | + | chr2: 60461639-60461664 | CAUGUGGCGCUUCAGCUUG | 763 |
| | | | | | CUGGCC | |
| 53335_4_211 | BCL11a | Exon 4 | + | chr2: 60461640-60461665 | AUGUGGCGCUUCAGCUUGC | 764 |
| | | | | | UGGCCU | |
| 53335_4_212 | BCL11a | Exon 4 | + | chr2: 60461651-60461676 | CAGCUUGCUGGCCUGGGUG | 765 |
| | | | | | CACGCG | |
| 53335_4_213 | BCL11a | Exon 4 | + | chr2: 60461660-60461685 | GGCCUGGGUGCACGCGUGG | 766 |
| | | | | | UCGCAC | |
| 53335_4_214 | BCL11a | Exon 4 | + | chr2: 60461673-60461698 | GCGUGGUCGCACAGGUUGC | 767 |
| | | | | | ACUUGU | |
| 53335_4_215 | BCL11a | Exon 4 | + | chr2: 60461674-60461699 | CGUGGUCGCACAGGUUGCA | 768 |
| | | | | | CUUGUA | |
| 53335_4_216 | BCL11a | Exon 4 | + | chr2: 60461690-60461715 | GCACUUGUAGGGCUUCUCG | 769 |
| | | | | | CCCGUG | |
| 53335_4_217 | BCL11a | Exon 4 | + | chr2: 60461699-60461724 | GGGCUUCUCGCCCGUGUGG | 770 |
| | | | | | CUGCGC | |
| 53335_4_218 | BCL11a | Exon 4 | + | chr2: 60461711-60461736 | CGUGUGGCUGCGCCGGUGC | 771 |
| | | | | | ACCACC | |
| 53335_4_219 | BCL11a | Exon 4 | + | chr2: 60461757-60461782 | GUCUUGCCGCAGAACUCGC | 772 |
| | | | | | AUGACU | |
| 53335_4_220 | BCL11a | Exon 4 | + | chr2: 60461767-60461792 | AGAACUCGCAUGACUUGGA | 773 |
| | | | | | CUUGAC | |
| 53335_4_221 | BCL11a | Exon 4 | + | chr2: 60461768-60461793 | GAACUCGCAUGACUUGGAC | 774 |
| | | | | | UUGACC | |
| 53335_4_222 | BCL11a | Exon 4 | + | chr2: 60461769-60461794 | AACUCGCAUGACUUGGACU | 775 |
| | | | | | UGACCG | |
| 53335_4_223 | BCL11a | Exon 4 | + | chr2: 60461770-60461795 | ACUCGCAUGACUUGGACUU | 776 |
| | | | | | GACCGG | |
| 53335_4_224 | BCL11a | Exon 4 | + | chr2: 60461774-60461799 | GCAUGACUUGGACUUGACC | 777 |
| | | | | | GGGGGC | |
| 53335_4_225 | BCL11a | Exon 4 | + | chr2: 60461775-60461800 | CAUGACUUGGACUUGACCG | 778 |
| | | | | | GGGGCU | |
| 53335_4_226 | BCL11a | Exon 4 | + | chr2: 60461778-60461803 | GACUUGGACUUGACCGGGG | 779 |
| | | | | | GCUGGG | |
| 53335_4_227 | BCL11a | Exon 4 | + | chr2: 60461779-60461804 | ACUUGGACUUGACCGGGGG | 780 |
| | | | | | CUGGGA | |
| 53335_4_228 | BCL11a | Exon 4 | + | chr2: 60461782-60461807 | UGGACUUGACCGGGGGCUG | 781 |
| | | | | | GGAGGG | |
| 53335_4_229 | BCL11a | Exon 4 | + | chr2: 60461785-60461810 | ACUUGACCGGGGGCUGGGA | 782 |
| | | | | | GGGAGG | |
| 53335_4_230 | BCL11a | Exon 4 | + | chr2: 60461786-60461811 | CUUGACCGGGGGCUGGGAG | 783 |
| | | | | | GGAGGA | |
| 53335_4_231 | BCL11a | Exon 4 | + | chr2: 60461787-60461812 | UUGACCGGGGGCUGGGAGG | 784 |
| | | | | | GAGGAG | |
| 53335_4_232 | BCL11a | Exon 4 | + | chr2: 60461790-60461815 | ACCGGGGGCUGGGAGGGAG | 785 |
| | | | | | GAGGGG | |
| 53335_4_233 | BCL11a | Exon 4 | + | chr2: 60461800-60461825 | GGGAGGGAGGAGGGGCGGA | 786 |
| | | | | | UUGCAG | |
| 53335_4_234 | BCL11a | Exon 4 | + | chr2: 60461803-60461828 | AGGGAGGAGGGGCGGAUUG | 787 |
| | | | | | CAGAGG | |
| 53335_4_235 | BCL11a | Exon 4 | + | chr2: 60461804-60461829 | GGGAGGAGGGGCGGAUUGC | 788 |
| | | | | | AGAGGA | |
| 53335_4_236 | BCL11a | Exon 4 | + | chr2: 60461807-60461832 | AGGAGGGGCGGAUUGCAGA | 789 |
| | | | | | GGAGGG | |
| 53335_4_237 | BCL11a | Exon 4 | + | chr2: 60461808-60461833 | GGAGGGGCGGAUUGCAGAG | 790 |
| | | | | | GAGGGA | |
| 53335_4_238 | BCL11a | Exon 4 | + | chr2: 60461809-60461834 | GAGGGGCGGAUUGCAGAGG | 791 |
| | | | | | AGGGAG | |
| 53335_4_239 | BCL11a | Exon 4 | + | chr2: 60461810-60461835 | AGGGGCGGAUUGCAGAGGA | 792 |
| | | | | | GGGAGG | |
| 53335_4_240 | BCL11a | Exon 4 | + | chr2: 60461811-60461836 | GGGGCGGAUUGCAGAGGAG | 793 |
| | | | | | GGAGGG | |
| 53335_4_241 | BCL11a | Exon 4 | + | chr2: 60461812-60461837 | GGGCGGAUUGCAGAGGAGG | 794 |
| | | | | | GAGGGG | |
| 53335_4_242 | BCL11a | Exon 4 | + | chr2: 60461822-60461847 | CAGAGGAGGGAGGGGGGGC | 795 |
| | | | | | GUCGCC | |
| 53335_4_243 | BCL11a | Exon 4 | + | chr2: 60461826-60461851 | GGAGGGAGGGGGGGCGUCG | 796 |
| | | | | | CCAGGA | |
| 53335_4_244 | BCL11a | Exon 4 | + | chr2: 60461827-60461852 | GAGGGAGGGGGGGCGUCGC | 797 |
| | | | | | CAGGAA | |
| 53335_4_245 | BCL11a | Exon 4 | + | chr2: 60461830-60461855 | GGAGGGGGGGCGUCGCCAG | 798 |
| | | | | | GAAGGG | |
| 53335_4_246 | BCL11a | Exon 4 | + | chr2: 60461842-60461867 | UCGCCAGGAAGGGCGGCUU | 799 |
| | | | | | GCUACC | |
| 53335_4_247 | BCL11a | Exon 4 | + | chr2: 60461846-60461871 | CAGGAAGGGCGGCUUGCUA | 800 |
| | | | | | CCUGGC | |
| 53335_4_248 | BCL11a | Exon 4 | + | chr2: 60461851-60461876 | AGGGCGGCUUGCUACCUGG | 801 |
| | | | | | CUGGAA | |
| 53335_4_249 | BCL11a | Exon 4 | + | chr2: 60461872-60461897 | GGAAUGGUUGCAGUAACCU | 802 |
| | | | | | UUGCAU | |
| 53335_4_250 | BCL11a | Exon 4 | + | chr2: 60461873-60461898 | GAAUGGUUGCAGUAACCUU | 803 |
| | | | | | UGCAUA | |
| 53335_4_251 | BCL11a | Exon 4 | + | chr2: 60461877-60461902 | GGUUGCAGUAACCUUUGCA | 804 |
| | | | | | UAGGGC | |
| 53335_4_252 | BCL11a | Exon 4 | + | chr2: 60461878-60461903 | GUUGCAGUAACCUUUGCAU | 805 |
| | | | | | AGGGCU | |
| 53335_4_253 | BCL11a | Exon 4 | + | chr2: 60461882-60461907 | CAGUAACCUUUGCAUAGGG | 806 |
| | | | | | CUGGGC | |
| 53335_4_254 | BCL11a | Exon 4 | + | chr2: 60461887-60461912 | ACCUUUGCAUAGGGCUGGG | 807 |
| | | | | | CCGGCC | |
| 53335_4_255 | BCL11a | Exon 4 | + | chr2: 60461888-60461913 | CCUUUGCAUAGGGCUGGGC | 808 |
| | | | | | CGGCCU | |
| 53335_4_256 | BCL11a | Exon 4 | + | chr2: 60461889-60461914 | CUUUGCAUAGGGCUGGGCC | 809 |
| | | | | | GGCCUG | |
| 53335_4_257 | BCL11a | Exon 4 | + | chr2: 60461896-60461921 | UAGGGCUGGGCCGGCCUGG | 810 |
| | | | | | GGACAG | |
| 53335_4_258 | BCL11a | Exon 4 | + | chr2: 60461899-60461924 | GGCUGGGCCGGCCUGGGGA | 811 |
| | | | | | CAGCGG | |
| 53335_4_259 | BCL11a | Exon 4 | + | chr2: 60461900-60461925 | GCUGGGCCGGCCUGGGGAC | 812 |
| | | | | | AGCGGU | |
| 53335_4_260 | BCL11a | Exon 4 | + | chr2: 60461949-60461974 | UCUCUAAGUCUCCUAGAGA | 813 |
| | | | | | AAUCCA | |
| 53335_4_261 | BCL11a | Exon 4 | + | chr2: 60461952-60461977 | CUAAGUCUCCUAGAGAAAU | 814 |
| | | | | | CCAUGG | |
| 53335_4_262 | BCL11a | Exon 4 | + | chr2: 60461953-60461978 | UAAGUCUCCUAGAGAAAUC | 815 |
| | | | | | CAUGGC | |
| 53335_4_263 | BCL11a | Exon 4 | + | chr2: 60461956-60461981 | GUCUCCUAGAGAAAUCCAU | 816 |
| | | | | | GGCGGG | |
| 53335_4_264 | BCL11a | Exon 4 | + | chr2: 60461971-60461996 | CCAUGGCGGGAGGCUCCAU | 817 |
| | | | | | AGCCAU | |
| 53335_4_265 | BCL11a | Exon 4 | + | chr2: 60461997-60462022 | GGAUUCAACCGCAGCACCC | 818 |
| | | | | | UGUCAA | |
| 53335_4_266 | BCL11a | Exon 4 | + | chr2: 60462004-60462029 | ACCGCAGCACCCUGUCAAA | 819 |
| | | | | | GGCACU | |
| 53335_4_267 | BCL11a | Exon 4 | + | chr2: 60462005-60462030 | CCGCAGCACCCUGUCAAAG | 820 |
| | | | | | GCACUC | |
| 53335_4_268 | BCL11a | Exon 4 | + | chr2: 60462011-60462036 | CACCCUGUCAAAGGCACUC | 821 |
| | | | | | GGGUGA | |
| 53335_4_269 | BCL11a | Exon 4 | + | chr2: 60462012-60462037 | ACCCUGUCAAAGGCACUCG | 822 |
| | | | | | GGUGAU | |
| 53335_4_270 | BCL11a | Exon 4 | + | chr2: 60462015-60462040 | CUGUCAAAGGCACUCGGGU | 823 |
| | | | | | GAUGGG | |
| 53335_4_271 | BCL11a | Exon 4 | + | chr2: 60462020-60462045 | AAAGGCACUCGGGUGAUGG | 824 |
| | | | | | GUGGCC | |
| 53335_4_272 | BCL11a | Exon 4 | + | chr2: 60462021-60462046 | AAGGCACUCGGGUGAUGGG | 825 |
| | | | | | UGGCCA | |
| 53335_4_273 | BCL11a | Exon 4 | + | chr2: 60462041-60462066 | GGCCAGGGCCAUCUCUUCC | 826 |
| | | | | | GCCCCC | |
| 53335_4_274 | BCL11a | Exon 4 | + | chr2: 60462053-60462078 | CUCUUCCGCCCCCAGGCGC | 827 |
| | | | | | UCUAUG | |
| 53335_4_275 | BCL11a | Exon 4 | + | chr2: 60462056-60462081 | UUCCGCCCCCAGGCGCUCU | 828 |
| | | | | | AUGCGG | |
| 53335_4_276 | BCL11a | Exon 4 | + | chr2: 60462057-60462082 | UCCGCCCCCAGGCGCUCUA | 829 |
| | | | | | UGCGGU | |
| 53335_4_277 | BCL11a | Exon 4 | + | chr2: 60462058-60462083 | CCGCCCCCAGGCGCUCUAU | 830 |
| | | | | | GCGGUG | |
| 53335_4_278 | BCL11a | Exon 4 | + | chr2: 60462059-60462084 | CGCCCCCAGGCGCUCUAUG | 831 |
| | | | | | CGGUGG | |
| 53335_4_279 | BCL11a | Exon 4 | + | chr2: 60462076-60462101 | UGCGGUGGGGGUCCAAGUG | 832 |
| | | | | | AUGUCU | |
| 53335_4_280 | BCL11a | Exon 4 | + | chr2: 60462079-60462104 | GGUGGGGGUCCAAGUGAUG | 833 |
| | | | | | UCUCGG | |
| 53335_4_281 | BCL11a | Exon 4 | + | chr2: 60462082-60462107 | GGGGGUCCAAGUGAUGUCU | 834 |
| | | | | | CGGUGG | |
| 53335_4_282 | BCL11a | Exon 4 | + | chr2: 60462092-60462117 | GUGAUGUCUCGGUGGUGGA | 835 |
| | | | | | CUAAAC | |
| 53335_4_283 | BCL11a | Exon 4 | + | chr2: 60462093-60462118 | UGAUGUCUCGGUGGUGGAC | 836 |
| | | | | | UAAACA | |
| 53335_4_284 | BCL11a | Exon 4 | + | chr2: 60462094-60462119 | GAUGUCUCGGUGGUGGACU | 837 |
| | | | | | AAACAG | |
| 53335_4_285 | BCL11a | Exon 4 | + | chr2: 60462095-60462120 | AUGUCUCGGUGGUGGACUA | 838 |
| | | | | | AACAGG | |
| 53335_4_286 | BCL11a | Exon 4 | + | chr2: 60462096-60462121 | UGUCUCGGUGGUGGACUAA | 839 |
| | | | | | ACAGGG | |
| 53335_4_287 | BCL11a | Exon 4 | + | chr2: 60462097-60462122 | GUCUCGGUGGUGGACUAAA | 840 |
| | | | | | CAGGGG | |
| 53335_4_288 | BCL11a | Exon 4 | + | chr2: 60462102-60462127 | GGUGGUGGACUAAACAGGG | 841 |
| | | | | | GGGGAG | |
| 53335_4_289 | BCL11a | Exon 4 | + | chr2: 60462103-60462128 | GUGGUGGACUAAACAGGGG | 842 |
| | | | | | GGGAGU | |
| 53335_4_290 | BCL11a | Exon 4 | + | chr2: 60462106-60462131 | GUGGACUAAACAGGGGGGG | 843 |
| | | | | | AGUGGG | |
| 53335_4_291 | BCL11a | Exon 4 | + | chr2: 60462125-60462150 | AGUGGGUGGAAAGCGCCCU | 844 |
| | | | | | UCUGCC | |
| 53335_4_292 | BCL11a | Exon 4 | + | chr2: 60462129-60462154 | GGUGGAAAGCGCCCUUCUG | 845 |
| | | | | | CCAGGC | |
| 53335_4_293 | BCL11a | Exon 4 | + | chr2: 60462154-60462179 | CGGAAGCCUCUCUCGAUAC | 846 |
| | | | | | UGAUCC | |
| 53335_4_294 | BCL11a | Exon 4 | + | chr2: 60462167-60462192 | CGAUACUGAUCCUGGUAUU | 847 |
| | | | | | CUUAGC | |
| 53335_4_295 | BCL11a | Exon 4 | + | chr2: 60462174-60462199 | GAUCCUGGUAUUCUUAGCA | 848 |
| | | | | | GGUUAA | |
| 53335_4_296 | BCL11a | Exon 4 | + | chr2: 60462175-60462200 | AUCCUGGUAUUCUUAGCAG | 849 |
| | | | | | GUUAAA | |
| 53335_4_297 | BCL11a | Exon 4 | + | chr2: 60462176-60462201 | UCCUGGUAUUCUUAGCAGG | 850 |
| | | | | | UUAAAG | |
| 53335_4_298 | BCL11a | Exon 4 | + | chr2: 60462203-60462228 | GUUAUUGUCUGCAAUAUGA | 851 |
| | | | | | AUCCCA | |
| 53335_4_299 | BCL11a | Exon 4 | + | chr2: 60462208-60462233 | UGUCUGCAAUAUGAAUCCC | 852 |
| | | | | | AUGGAG | |
| 53335_4_300 | BCL11a | Exon 4 | + | chr2: 60462211-60462236 | CUGCAAUAUGAAUCCCAUG | 853 |
| | | | | | GAGAGG | |
| 53335_4_301 | BCL11a | Exon 4 | + | chr2: 60462215-60462240 | AAUAUGAAUCCCAUGGAGA | 854 |
| | | | | | GGUGGC | |
| 53335_4_302 | BCL11a | Exon 4 | + | chr2: 60462216-60462241 | AUAUGAAUCCCAUGGAGAG | 855 |
| | | | | | GUGGCU | |
| 53335_4_303 | BCL11a | Exon 4 | + | chr2: 60462220-60462245 | GAAUCCCAUGGAGAGGUGG | 856 |
| | | | | | CUGGGA | |
| 53335_4_304 | BCL11a | Exon 4 | + | chr2: 60462244-60462269 | AAGGACAUUCUGCACCUAG | 857 |
| | | | | | UCCUGA | |
| 53335_4_305 | BCL11a | Exon 4 | + | chr2: 60462245-60462270 | AGGACAUUCUGCACCUAGU | 858 |
| | | | | | CCUGAA | |
| 53335_4_306 | BCL11a | Exon 4 | + | chr2: 60462259-60462284 | CUAGUCCUGAAGGGAUACC | 859 |
| | | | | | AACCCG | |
| 53335_4_307 | BCL11a | Exon 4 | + | chr2: 60462260-60462285 | UAGUCCUGAAGGGAUACCA | 860 |
| | | | | | ACCCGC | |
| 53335_4_308 | BCL11a | Exon 4 | + | chr2: 60462261-60462286 | AGUCCUGAAGGGAUACCAA | 861 |
| | | | | | CCCGCG | |
| 53335_4_309 | BCL11a | Exon 4 | + | chr2: 60462266-60462291 | UGAAGGGAUACCAACCCGC | 862 |
| | | | | | GGGGUC | |
| 53335_4_310 | BCL11a | Exon 4 | + | chr2: 60462267-60462292 | GAAGGGAUACCAACCCGCG | 863 |
| | | | | | GGGUCA | |
| 53335_4_311 | BCL11a | Exon 4 | + | chr2: 60462268-60462293 | AAGGGAUACCAACCCGCGG | 864 |
| | | | | | GGUCAG | |
| 53335_4_312 | BCL11a | Exon 4 | + | chr2: 60462345-60462370 | GCGUGUUGCAAGAGAAACC | 865 |
| | | | | | AUGCAC | |
| 53335_4_313 | BCL11a | Exon 4 | + | chr2: 60462352-60462377 | GCAAGAGAAACCAUGCACU | 866 |
| | | | | | GGUGAA | |
| 53335_4_314 | BCL11a | Exon 4 | + | chr2: 60462384-60462409 | UUGCAAGUUGUACAUGUGU | 867 |
| | | | | | AGCUGC | |
| 53335_4_315 | BCL11a | Exon 4 | + | chr2: 60462385-60462410 | UGCAAGUUGUACAUGUGUA | 868 |
| | | | | | GCUGCU | |
| 53335_4_316 | BCL11a | Exon 4 | − | chr2: 60457269-60457294 | GGAAAAACCACUGUCUGUG | 869 |
| | | | | | UUUUUU | |
| 53335_4_317 | BCL11a | Exon 4 | − | chr2: 60457295-60457320 | GUUUCUGGUCUUUGUUAAG | 870 |
| | | | | | UUCUAU | |
| 53335_4_318 | BCL11a | Exon 4 | − | chr2: 60457315-60457340 | CCUGGCUUUUUAUUGUAUU | 871 |
| | | | | | UGUUUC | |
| 53335_4_319 | BCL11a | Exon 4 | − | chr2: 60457338-60457363 | AAGAUGACCAAAGGUCAUU | 872 |
| | | | | | ACAACC | |
| 53335_4_320 | BCL11a | Exon 4 | − | chr2: 60457352-60457377 | AAAAAAAAAAAUAAAAGAU | 873 |
| | | | | | GACCAA | |
| 53335_4_321 | BCL11a | Exon 4 | − | chr2: 60457415-60457440 | UGCUUAUGUGCCCUGUUCA | 874 |
| | | | | | AAACAG | |
| 53335_4_322 | BCL11a | Exon 4 | − | chr2: 60457459-60457484 | AACUUGAAAUUUUAUCUUU | 875 |
| | | | | | UACUAU | |
| 53335_4_323 | BCL11a | Exon 4 | − | chr2: 60457460-60457485 | UAACUUGAAAUUUUAUCUU | 876 |
| | | | | | UUACUA | |
| 53335_4_324 | BCL11a | Exon 4 | − | chr2: 60457522-60457547 | AUGGCAAUGCAGAAUAUUU | 877 |
| | | | | | UGUUAU | |
| 53335_4_325 | BCL11a | Exon 4 | − | chr2: 60457546-60457571 | GCUUUAGUCAAUACUUUUU | 878 |
| | | | | | UGUAAA | |
| 53335_4_326 | BCL11a | Exon 4 | − | chr2: 60457613-60457638 | ACUAAAUGGUGCUUUAUAU | 879 |
| | | | | | UUAGAU | |
| 53335_4_327 | BCL11a | Exon 4 | − | chr2: 60457632-60457657 | GUUUUUUUCAUUGCCAAAA | 880 |
| | | | | | ACUAAA | |
| 53335_4_328 | BCL11a | Exon 4 | − | chr2: 60457786-60457811 | AUGCAGUACUGCAAGCUAA | 881 |
| | | | | | UAACGU | |
| 53335_4_329 | BCL11a | Exon 4 | − | chr2: 60457858-60457883 | AAUGUCACAUGGAUGGCUG | 882 |
| | | | | | UCAUAG | |
| 53335_4_330 | BCL11a | Exon 4 | − | chr2: 60457859-60457884 | GAAUGUCACAUGGAUGGCU | 883 |
| | | | | | GUCAUA | |
| 53335_4_331 | BCL11a | Exon 4 | − | chr2: 60457860-60457885 | AGAAUGUCACAUGGAUGGC | 884 |
| | | | | | UGUCAU | |
| 53335_4_332 | BCL11a | Exon 4 | − | chr2: 60457870-60457895 | GGAGCCUGCUAGAAUGUCA | 885 |
| | | | | | CAUGGA | |
| 53335_4_333 | BCL11a | Exon 4 | − | chr2: 60457874-60457899 | UGGGGGAGCCUGCUAGAAU | 886 |
| | | | | | GUCACA | |
| 53335_4_334 | BCL11a | Exon 4 | − | chr2: 60457896-60457921 | GAGAAGCCAUAUAAUGGCG | 887 |
| | | | | | GUUUGG | |
| 53335_4_335 | BCL11a | Exon 4 | − | chr2: 60457897-60457922 | UGAGAAGCCAUAUAAUGGC | 888 |
| | | | | | GGUUUG | |
| 53335_4_336 | BCL11a | Exon 4 | − | chr2: 60457898-60457923 | AUGAGAAGCCAUAUAAUGG | 889 |
| | | | | | CGGUUU | |
| 53335_4_337 | BCL11a | Exon 4 | − | chr2: 60457899-60457924 | GAUGAGAAGCCAUAUAAUG | 890 |
| | | | | | GCGGUU | |
| 53335_4_338 | BCL11a | Exon 4 | − | chr2: 60457904-60457929 | UUACAGAUGAGAAGCCAUA | 891 |
| | | | | | UAAUGG | |
| 53335_4_339 | BCL11a | Exon 4 | − | chr2: 60457907-60457932 | ACAUUACAGAUGAGAAGCC | 892 |
| | | | | | AUAUAA | |
| 53335_4_340 | BCL11a | Exon 4 | − | chr2: 60457999-60458024 | CCACAGUAUAUUUUUUUAA | 893 |
| | | | | | UUUGGC | |
| 53335_4_341 | BCL11a | Exon 4 | − | chr2: 60458003-60458028 | GCUGCCACAGUAUAUUUUU | 894 |
| | | | | | UUAAUU | |
| 53335_4_342 | BCL11a | Exon 4 | − | chr2: 60458030-60458055 | UUUUGGUAGUGGAAAAAAA | 895 |
| | | | | | AAAGAC | |
| 53335_4_343 | BCL11a | Exon 4 | − | chr2: 60458046-60458071 | GGUAUCAAUGUACCUUUUU | 896 |
| | | | | | UGGUAG | |
| 53335_4_344 | BCL11a | Exon 4 | − | chr2: 60458052-60458077 | UUAAAAGGUAUCAAUGUAC | 897 |
| | | | | | CUUUUU | |
| 53335_4_345 | BCL11a | Exon 4 | − | chr2: 60458072-60458097 | UUUAACUGUUGCUUGUUCU | 898 |
| | | | | | CUUAAA | |
| 53335_4_346 | BCL11a | Exon 4 | − | chr2: 60458130-60458155 | UUGAAUUAAAUGUUCAUCU | 899 |
| | | | | | AGUGUU | |
| 53335_4_347 | BCL11a | Exon 4 | − | chr2: 60458161-60458186 | UGGUCUUUUUUCUGUAUUU | 900 |
| | | | | | CUAGAA | |
| 53335_4_348 | BCL11a | Exon 4 | − | chr2: 60458186-60458211 | UGAUUCCUAUGCUAAAAUA | 901 |
| | | | | | CAUUUA | |
| 53335_4_349 | BCL11a | Exon 4 | − | chr2: 60458231-60458256 | UUAAGAUUAUAUAGUACUU | 902 |
| | | | | | AAAUAU | |
| 53335_4_350 | BCL11a | Exon 4 | − | chr2: 60458260-60458285 | AAAAAAAAAAACAUACAUU | 903 |
| | | | | | GGGGAA | |
| 53335_4_351 | BCL11a | Exon 4 | − | chr2: 60458265-60458290 | UUGUAAAAAAAAAAAACAU | 904 |
| | | | | | ACAUUG | |
| 53335_4_352 | BCL11a | Exon 4 | − | chr2: 60458266-60458291 | GUUGUAAAAAAAAAAAACA | 905 |
| | | | | | UACAUU | |
| 53335_4_353 | BCL11a | Exon 4 | − | chr2: 60458267-60458292 | GGUUGUAAAAAAAAAAAAC | 906 |
| | | | | | AUACAU | |
| 53335_4_354 | BCL11a | Exon 4 | − | chr2: 60458293-60458318 | AUGCCUUGGAUACACACCG | 907 |
| | | | | | CUCUUC | |
| 53335_4_355 | BCL11a | Exon 4 | − | chr2: 60458312-60458337 | AAAUGGUAGUGGAAAUUCU | 908 |
| | | | | | AUGCCU | |
| 53335_4_356 | BCL11a | Exon 4 | − | chr2: 60458328-60458353 | CUUGUUAUCCAUUUAAAAA | 909 |
| | | | | | UGGUAG | |
| 53335_4_357 | BCL11a | Exon 4 | − | chr2: 60458334-60458359 | ACAAGACUUGUUAUCCAUU | 910 |
| | | | | | UAAAAA | |
| 53335_4_358 | BCL11a | Exon 4 | − | chr2: 60458366-60458391 | GCAUUUUAGGGUUCCAUUG | 911 |
| | | | | | UCUUGG | |
| 53335_4_359 | BCL11a | Exon 4 | − | chr2: 60458369-60458394 | ACUGCAUUUUAGGGUUCCA | 912 |
| | | | | | UUGUCU | |
| 53335_4_360 | BCL11a | Exon 4 | − | chr2: 60458383-60458408 | AUGUUUAGGGGGGAACUGC | 913 |
| | | | | | AUUUUA | |
| 53335_4_361 | BCL11a | Exon 4 | − | chr2: 60458384-60458409 | UAUGUUUAGGGGGGAACUG | 914 |
| | | | | | CAUUUU | |
| 53335_4_362 | BCL11a | Exon 4 | − | chr2: 60458398-60458423 | AAAAAACACUUCAUUAUGU | 915 |
| | | | | | UUAGGG | |
| 53335_4_363 | BCL11a | Exon 4 | − | chr2: 60458399-60458424 | UAAAAAACACUUCAUUAUG | 916 |
| | | | | | UUUAGG | |
| 53335_4_364 | BCL11a | Exon 4 | − | chr2: 60458400-60458425 | UUAAAAAACACUUCAUUAU | 917 |
| | | | | | GUUUAG | |
| 53335_4_365 | BCL11a | Exon 4 | − | chr2: 60458401-60458426 | UUUAAAAAACACUUCAUUA | 918 |
| | | | | | UGUUUA | |
| 53335_4_366 | BCL11a | Exon 4 | − | chr2: 60458402-60458427 | UUUUAAAAAACACUUCAUU | 919 |
| | | | | | AUGUUU | |
| 53335_4_367 | BCL11a | Exon 4 | − | chr2: 60458478-60458503 | UGAUUGCUUUCGCUUCUAC | 920 |
| | | | | | AGUGCA | |
| 53335_4_368 | BCL11a | Exon 4 | − | chr2: 60458535-60458560 | GACGCAACAUUGCAAGCGC | 921 |
| | | | | | UGUGAA | |
| 53335_4_369 | BCL11a | Exon 4 | − | chr2: 60458562-60458587 | UACUUGACUAUUGAGCUUA | 922 |
| | | | | | CUUACU | |
| 53335_4_370 | BCL11a | Exon 4 | − | chr2: 60458634-60458659 | AAAAAAAUUGAACACAAUC | 923 |
| | | | | | UCAUUG | |
| 53335_4_371 | BCL11a | Exon 4 | − | chr2: 60458682-60458707 | UCCCAGUUUACAGGUCUAU | 924 |
| | | | | | ACUUAA | |
| 53335_4_372 | BCL11a | Exon 4 | − | chr2: 60458683-60458708 | UUCCCAGUUUACAGGUCUA | 925 |
| | | | | | UACUUA | |
| 53335_4_373 | BCL11a | Exon 4 | − | chr2: 60458696-60458721 | GCACUGUACAAUUUUCCCA | 926 |
| | | | | | GUUUAC | |
| 53335_4_374 | BCL11a | Exon 4 | − | chr2: 60458734-60458759 | GAGUAUAAAAUAAACCUGC | 927 |
| | | | | | UCAGAU | |
| 53335_4_375 | BCL11a | Exon 4 | − | chr2: 60458764-60458789 | AUCUUUUCUCUAAUCAGAG | 928 |
| | | | | | AUACAG | |
| 53335_4_376 | BCL11a | Exon 4 | − | chr2: 60458829-60458854 | AAUAAAAGCUAGCAUCUGC | 929 |
| | | | | | CCCAGU | |
| 53335_4_377 | BCL11a | Exon 4 | − | chr2: 60458897-60458922 | UGUGCUAUUUGUGUUAACA | 930 |
| | | | | | UGGAAG | |
| 53335_4_378 | BCL11a | Exon 4 | − | chr2: 60458903-60458928 | ACACUGUGUGCUAUUUGUG | 931 |
| | | | | | UUAACA | |
| 53335_4_379 | BCL11a | Exon 4 | − | chr2: 60459085-60459110 | ACUAUUUGCCAUUUAAAAC | 932 |
| | | | | | UAGAAC | |
| 53335_4_380 | BCL11a | Exon 4 | − | chr2: 60459114-60459139 | AAUAAUAUGAUUUAUUAGC | 933 |
| | | | | | ACAACG | |
| 53335_4_381 | BCL11a | Exon 4 | − | chr2: 60459152-60459177 | AGGCUGACAAUAAGGUUUG | 934 |
| | | | | | ACAGAG | |
| 53335_4_382 | BCL11a | Exon 4 | − | chr2: 60459153-60459178 | GAGGCUGACAAUAAGGUUU | 935 |
| | | | | | GACAGA | |
| 53335_4_383 | BCL11a | Exon 4 | − | chr2: 60459154-60459179 | AGAGGCUGACAAUAAGGUU | 936 |
| | | | | | UGACAG | |
| 53335_4_384 | BCL11a | Exon 4 | − | chr2: 60459165-60459190 | UAUUGAAAGGAAGAGGCUG | 937 |
| | | | | | ACAAUA | |
| 53335_4_385 | BCL11a | Exon 4 | − | chr2: 60459177-60459202 | CCUUGUAUACCAUAUUGAA | 938 |
| | | | | | AGGAAG | |
| 53335_4_386 | BCL11a | Exon 4 | − | chr2: 60459183-60459208 | UUAAGACCUUGUAUACCAU | 939 |
| | | | | | AUUGAA | |
| 53335_4_387 | BCL11a | Exon 4 | − | chr2: 60459229-60459254 | GAUCCAGAUCUACUUGGUU | 940 |
| | | | | | GUCAAG | |
| 53335_4_388 | BCL11a | Exon 4 | − | chr2: 60459240-60459265 | CAAAAGAAAUAGAUCCAGA | 941 |
| | | | | | UCUACU | |
| 53335_4_389 | BCL11a | Exon 4 | − | chr2: 60459271-60459296 | UUUAAUAAUGUCUUUUUAA | 942 |
| | | | | | AAAUAC | |
| 53335_4_390 | BCL11a | Exon 4 | − | chr2: 60459323-60459348 | UGGAACGCAAUUAAAUACA | 943 |
| | | | | | CUAGUA | |
| 53335_4_391 | BCL11a | Exon 4 | − | chr2: 60459348-60459373 | UUGAAUGUGUAAUGUGCAA | 944 |
| | | | | | AAGCCC | |
| 53335_4_392 | BCL11a | Exon 4 | − | chr2: 60459418-60459443 | CUCCUGGUGAGAGCUUAAA | 945 |
| | | | | | AGAAAU | |
| 53335_4_393 | BCL11a | Exon 4 | − | chr2: 60459419-60459444 | GCUCCUGGUGAGAGCUUAA | 946 |
| | | | | | AAGAAA | |
| 53335_4_394 | BCL11a | Exon 4 | − | chr2: 60459439-60459464 | ACCAGUAUAAAAGCUACUU | 947 |
| | | | | | UGCUCC | |
| 53335_4_395 | BCL11a | Exon 4 | − | chr2: 60459547-60459572 | UUCUAUAUUGUAUUUCUCA | 948 |
| | | | | | CAACAA | |
| 53335_4_396 | BCL11a | Exon 4 | − | chr2: 60459588-60459613 | AGCAUUGGGUGAGGUAAUA | 949 |
| | | | | | AACCUU | |
| 53335_4_397 | BCL11a | Exon 4 | − | chr2: 60459602-60459627 | UUGUAGCUUAAUUCAGCAU | 950 |
| | | | | | UGGGUG | |
| 53335_4_398 | BCL11a | Exon 4 | − | chr2: 60459607-60459632 | UAAACUUGUAGCUUAAUUC | 951 |
| | | | | | AGCAUU | |
| 53335_4_399 | BCL11a | Exon 4 | − | chr2: 60459608-60459633 | AUAAACUUGUAGCUUAAUU | 952 |
| | | | | | CAGCAU | |
| 53335_4_400 | BCL11a | Exon 4 | − | chr2: 60459651-60459676 | CUUGGAUCUAUUAAAACCA | 953 |
| | | | | | CAUCGA | |
| 53335_4_401 | BCL11a | Exon 4 | − | chr2: 60459674-60459699 | AUUUGGUUUUAAAAUAUGA | 954 |
| | | | | | GUGCCU | |
| 53335_4_402 | BCL11a | Exon 4 | − | chr2: 60459696-60459721 | AACAGAACAAGUUUAUUCU | 955 |
| | | | | | AUCAUU | |
| 53335_4_403 | BCL11a | Exon 4 | − | chr2: 60459749-60459774 | UGUAUCAAUUGGAAAGGAA | 956 |
| | | | | | GAAAAA | |
| 53335_4_404 | BCL11a | Exon 4 | − | chr2: 60459760-60459785 | AAAGGGUUAAAUGUAUCAA | 957 |
| | | | | | UUGGAA | |
| 53335_4_405 | BCL11a | Exon 4 | − | chr2: 60459765-60459790 | UCUCUAAAGGGUUAAAUGU | 958 |
| | | | | | AUCAAU | |
| 53335_4_406 | BCL11a | Exon 4 | − | chr2: 60459782-60459807 | UAUGAGCUAAAUGUCUGUC | 959 |
| | | | | | UCUAAA | |
| 53335_4_407 | BCL11a | Exon 4 | − | chr2: 60459783-60459808 | CUAUGAGCUAAAUGUCUGU | 960 |
| | | | | | CUCUAA | |
| 53335_4_408 | BCL11a | Exon 4 | − | chr2: 60459855-60459880 | UAACGUGAGGAGGAAAAAC | 961 |
| | | | | | AGUCUU | |
| 53335_4_409 | BCL11a | Exon 4 | − | chr2: 60459870-60459895 | UACAGUUUUAUUUUAUAAC | 962 |
| | | | | | GUGAGG | |
| 53335_4_410 | BCL11a | Exon 4 | − | chr2: 60459873-60459898 | AUGUACAGUUUUAUUUUAU | 963 |
| | | | | | AACGUG | |
| 53335_4_411 | BCL11a | Exon 4 | − | chr2: 60460023-60460048 | CUUAGACAGCAUGUAUGGU | 964 |
| | | | | | AUGUUA | |
| 53335_4_412 | BCL11a | Exon 4 | − | chr2: 60460033-60460058 | UUUUUUUAAACUUAGACAG | 965 |
| | | | | | CAUGUA | |
| 53335_4_413 | BCL11a | Exon 4 | − | chr2: 60460130-60460155 | ACCGUUUGAAUGCAUGAUC | 966 |
| | | | | | UGUAUG | |
| 53335_4_414 | BCL11a | Exon 4 | − | chr2: 60460131-60460156 | CACCGUUUGAAUGCAUGAU | 967 |
| | | | | | CUGUAU | |
| 53335_4_415 | BCL11a | Exon 4 | − | chr2: 60460132-60460157 | UCACCGUUUGAAUGCAUGA | 968 |
| | | | | | UCUGUA | |
| 53335_4_416 | BCL11a | Exon 4 | − | chr2: 60460314-60460339 | AUCGCCCUCCAGCCCCACUC | 969 |
| | | | | | CCUGU | |
| 53335_4_417 | BCL11a | Exon 4 | − | chr2: 60460403-60460428 | GAAUAAUGAUAUAAAAACU | 970 |
| | | | | | GAAUAG | |
| 53335_4_418 | BCL11a | Exon 4 | − | chr2: 60460448-60460473 | UACCCUGGAGAAACACAUG | 971 |
| | | | | | AAAAAA | |
| 53335_4_419 | BCL11a | Exon 4 | − | chr2: 60460468-60460493 | AUGCCUUUUAGCGUGUACA | 972 |
| | | | | | GUACCC | |
| 53335_4_420 | BCL11a | Exon 4 | − | chr2: 60460522-60460547 | AUGAAAACGCAUGGCCAGG | 973 |
| | | | | | UGGGGA | |
| 53335_4_421 | BCL11a | Exon 4 | − | chr2: 60460526-60460551 | GCACAUGAAAACGCAUGGC | 974 |
| | | | | | CAGGUG | |
| 53335_4_422 | BCL11a | Exon 4 | − | chr2: 60460527-60460552 | GGCACAUGAAAACGCAUGG | 975 |
| | | | | | CCAGGU | |
| 53335_4_423 | BCL11a | Exon 4 | − | chr2: 60460528-60460553 | AGGCACAUGAAAACGCAUG | 976 |
| | | | | | GCCAGG | |
| 53335_4_424 | BCL11a | Exon 4 | − | chr2: 60460531-60460556 | ACCAGGCACAUGAAAACGC | 977 |
| | | | | | AUGGCC | |
| 53335_4_425 | BCL11a | Exon 4 | − | chr2: 60460536-60460561 | AGCUCACCAGGCACAUGAA | 978 |
| | | | | | AACGCA | |
| 53335_4_426 | BCL11a | Exon 4 | − | chr2: 60460553-60460578 | CUGUGCCCAGAGUAGCAAG | 979 |
| | | | | | CUCACC | |
| 53335_4_427 | BCL11a | Exon 4 | − | chr2: 60460610-60460635 | CCACAGGAGAAGCCACACG | 980 |
| | | | | | GGCGAA | |
| 53335_4_428 | BCL11a | Exon 4 | − | chr2: 60460617-60460642 | UCACUGUCCACAGGAGAAG | 981 |
| | | | | | CCACAC | |
| 53335_4_429 | BCL11a | Exon 4 | − | chr2: 60460618-60460643 | CUCACUGUCCACAGGAGAA | 982 |
| | | | | | GCCACA | |
| 53335_4_430 | BCL11a | Exon 4 | − | chr2: 60460631-60460656 | GAACUGUAGCAAUCUCACU | 983 |
| | | | | | GUCCAC | |
| 53335_4_431 | BCL11a | Exon 4 | − | chr2: 60460670-60460695 | ACGCAGCGACACUUGUGAG | 984 |
| | | | | | UACUGU | |
| 53335_4_432 | BCL11a | Exon 4 | − | chr2: 60460671-60460696 | GACGCAGCGACACUUGUGA | 985 |
| | | | | | GUACUG | |
| 53335_4_433 | BCL11a | Exon 4 | − | chr2: 60460701-60460726 | GCCCGGGCAGGCCCAGCUC | 986 |
| | | | | | AAAAGA | |
| 53335_4_434 | BCL11a | Exon 4 | − | chr2: 60460702-60460727 | GGCCCGGGCAGGCCCAGCU | 987 |
| | | | | | CAAAAG | |
| 53335_4_435 | BCL11a | Exon 4 | − | chr2: 60460718-60460743 | CCAUAUUAGUGGUCCGGGC | 988 |
| | | | | | CCGGGC | |
| 53335_4_436 | BCL11a | Exon 4 | − | chr2: 60460722-60460747 | CGCCCCAUAUUAGUGGUCC | 989 |
| | | | | | GGGCCC | |
| 53335_4_437 | BCL11a | Exon 4 | − | chr2: 60460723-60460748 | ACGCCCCAUAUUAGUGGUC | 990 |
| | | | | | CGGGCC | |
| 53335_4_438 | BCL11a | Exon 4 | − | chr2: 60460728-60460753 | GGAGCACGCCCCAUAUUAG | 991 |
| | | | | | UGGUCC | |
| 53335_4_439 | BCL11a | Exon 4 | − | chr2: 60460729-60460754 | GGGAGCACGCCCCAUAUUA | 992 |
| | | | | | GUGGUC | |
| 53335_4_440 | BCL11a | Exon 4 | − | chr2: 60460734-60460759 | GUGGAGGGAGCACGCCCCA | 993 |
| | | | | | UAUUAG | |
| 53335_4_441 | BCL11a | Exon 4 | − | chr2: 60460754-60460779 | GGGGCGCAGCGGCACGGGA | 994 |
| | | | | | AGUGGA | |
| 53335_4_442 | BCL11a | Exon 4 | − | chr2: 60460755-60460780 | CGGGGCGCAGCGGCACGGG | 995 |
| | | | | | AAGUGG | |
| 53335_4_443 | BCL11a | Exon 4 | − | chr2: 60460758-60460783 | UCUCGGGGCGCAGCGGCAC | 996 |
| | | | | | GGGAAG | |
| 53335_4_444 | BCL11a | Exon 4 | − | chr2: 60460764-60460789 | GAGGGAUCUCGGGGCGCAG | 997 |
| | | | | | CGGCAC | |
| 53335_4_445 | BCL11a | Exon 4 | − | chr2: 60460765-60460790 | GGAGGGAUCUCGGGGCGCA | 998 |
| | | | | | GCGGCA | |
| 53335_4_446 | BCL11a | Exon 4 | − | chr2: 60460770-60460795 | UGGACGGAGGGAUCUCGGG | 999 |
| | | | | | GCGCAG | |
| 53335_4_447 | BCL11a | Exon 4 | − | chr2: 60460778-60460803 | CGGGGAGCUGGACGGAGGG | 1000 |
| | | | | | AUCUCG | |
| 53335_4_448 | BCL11a | Exon 4 | − | chr2: 60460779-60460804 | CCGGGGAGCUGGACGGAGG | 1001 |
| | | | | | GAUCUC | |
| 53335_4_449 | BCL11a | Exon 4 | − | chr2: 60460780-60460805 | CCCGGGGAGCUGGACGGAG | 1002 |
| | | | | | GGAUCU | |
| 53335_4_450 | BCL11a | Exon 4 | − | chr2: 60460787-60460812 | CACACCGCCCGGGGAGCUG | 1003 |
| | | | | | GACGGA | |
| 53335_4_451 | BCL11a | Exon 4 | − | chr2: 60460788-60460813 | CCACACCGCCCGGGGAGCU | 1004 |
| | | | | | GGACGG | |
| 53335_4_452 | BCL11a | Exon 4 | − | chr2: 60460791-60460816 | UCUCCACACCGCCCGGGGA | 1005 |
| | | | | | GCUGGA | |
| 53335_4_453 | BCL11a | Exon 4 | − | chr2: 60460795-60460820 | CGCUUCUCCACACCGCCCG | 1006 |
| | | | | | GGGAGC | |
| 53335_4_454 | BCL11a | Exon 4 | − | chr2: 60460801-60460826 | AGUUUGCGCUUCUCCACAC | 1007 |
| | | | | | CGCCCG | |
| 53335_4_455 | BCL11a | Exon 4 | − | chr2: 60460802-60460827 | GAGUUUGCGCUUCUCCACA | 1008 |
| | | | | | CCGCCC | |
| 53335_4_456 | BCL11a | Exon 4 | − | chr2: 60460803-60460828 | GGAGUUUGCGCUUCUCCAC | 1009 |
| | | | | | ACCGCC | |
| 53335_4_457 | BCL11a | Exon 4 | − | chr2: 60460829-60460854 | CUCGUCGGAGCACUCCUCG | 1010 |
| | | | | | GAGAAC | |
| 53335_4_458 | BCL11a | Exon 4 | − | chr2: 60460830-60460855 | CCUCGUCGGAGCACUCCUC | 1011 |
| | | | | | GGAGAA | |
| 53335_4_459 | BCL11a | Exon 4 | − | chr2: 60460837-60460862 | UUUGCCUCCUCGUCGGAGC | 1012 |
| | | | | | ACUCCU | |
| 53335_4_460 | BCL11a | Exon 4 | − | chr2: 60460849-60460874 | AGACAAUCGCCUUUUGCCU | 1013 |
| | | | | | CCUCGU | |
| 53335_4_461 | BCL11a | Exon 4 | − | chr2: 60460884-60460909 | AGCUCAAAGAUCCCUUCCU | 1014 |
| | | | | | UAGCUU | |
| 53335_4_462 | BCL11a | Exon 4 | − | chr2: 60460913-60460938 | GUGGCUCGCCGGCUACGCG | 1015 |
| | | | | | GCCUCC | |
| 53335_4_463 | BCL11a | Exon 4 | − | chr2: 60460921-60460946 | UACUCGCAGUGGCUCGCCG | 1016 |
| | | | | | GCUACG | |
| 53335_4_464 | BCL11a | Exon 4 | − | chr2: 60460929-60460954 | AGAACGUGUACUCGCAGUG | 1017 |
| | | | | | GCUCGC | |
| 53335_4_465 | BCL11a | Exon 4 | − | chr2: 60460937-60460962 | CAACACGGAGAACGUGUAC | 1018 |
| | | | | | UCGCAG | |
| 53335_4_466 | BCL11a | Exon 4 | − | chr2: 60460957-60460982 | CUGCCCCCGGCCGCGAUGC | 1019 |
| | | | | | CCAACA | |
| 53335_4_467 | BCL11a | Exon 4 | − | chr2: 60460975-60461000 | CUCGAGAAGGAGUUCGACC | 1020 |
| | | | | | UGCCCC | |
| 53335_4_468 | BCL11a | Exon 4 | − | chr2: 60460993-60461018 | UUCUCUAAGCGCAUCAAGC | 1021 |
| | | | | | UCGAGA | |
| 53335_4_469 | BCL11a | Exon 4 | − | chr2: 60461043-60461068 | GGGGCCUGUCCAAAAAGCU | 1022 |
| | | | | | GCUGCU | |
| 53335_4_470 | BCL11a | Exon 4 | − | chr2: 60461044-60461069 | GGGGGCCUGUCCAAAAAGC | 1023 |
| | | | | | UGCUGC | |
| 53335_4_471 | BCL11a | Exon 4 | − | chr2: 60461067-60461092 | GCUCCCCGGGCGAGUCGGC | 1024 |
| | | | | | CUCGGG | |
| 53335_4_472 | BCL11a | Exon 4 | − | chr2: 60461068-60461093 | UGCUCCCCGGGCGAGUCGG | 1025 |
| | | | | | CCUCGG | |
| 53335_4_473 | BCL11a | Exon 4 | − | chr2: 60461069-60461094 | CUGCUCCCCGGGCGAGUCG | 1026 |
| | | | | | GCCUCG | |
| 53335_4_474 | BCL11a | Exon 4 | − | chr2: 60461070-60461095 | GCUGCUCCCCGGGCGAGUC | 1027 |
| | | | | | GGCCUC | |
| 53335_4_475 | BCL11a | Exon 4 | − | chr2: 60461071-60461096 | GGCUGCUCCCCGGGCGAGU | 1028 |
| | | | | | CGGCCU | |
| 53335_4_476 | BCL11a | Exon 4 | − | chr2: 60461077-60461102 | GGCCGCGGCUGCUCCCCGG | 1029 |
| | | | | | GCGAGU | |
| 53335_4_477 | BCL11a | Exon 4 | − | chr2: 60461085-60461110 | CUGUUAAUGGCCGCGGCUG | 1030 |
| | | | | | CUCCCC | |
| 53335_4_478 | BCL11a | Exon 4 | − | chr2: 60461086-60461111 | ACUGUUAAUGGCCGCGGCU | 1031 |
| | | | | | GCUCCC | |
| 53335_4_479 | BCL11a | Exon 4 | − | chr2: 60461097-60461122 | UAGACGAUGGCACUGUUAA | 1032 |
| | | | | | UGGCCG | |
| 53335_4_480 | BCL11a | Exon 4 | − | chr2: 60461103-60461128 | ACCGCAUAGACGAUGGCAC | 1033 |
| | | | | | UGUUAA | |
| 53335_4_481 | BCL11a | Exon 4 | − | chr2: 60461115-60461140 | CCGGCGAGUCGGACCGCAU | 1034 |
| | | | | | AGACGA | |
| 53335_4_482 | BCL11a | Exon 4 | − | chr2: 60461131-60461156 | GACGAAGACUCGGUGGCCG | 1035 |
| | | | | | GCGAGU | |
| 53335_4_483 | BCL11a | Exon 4 | − | chr2: 60461139-60461164 | ACACUUGCGACGAAGACUC | 1036 |
| | | | | | GGUGGC | |
| 53335_4_484 | BCL11a | Exon 4 | − | chr2: 60461143-60461168 | AGGGACACUUGCGACGAAG | 1037 |
| | | | | | ACUCGG | |
| 53335_4_485 | BCL11a | Exon 4 | − | chr2: 60461146-60461171 | CACAGGGACACUUGCGACG | 1038 |
| | | | | | AAGACU | |
| 53335_4_486 | BCL11a | Exon 4 | − | chr2: 60461167-60461192 | CACCUGGCCGAGGCCGAGG | 1039 |
| | | | | | GCCACA | |
| 53335_4_487 | BCL11a | Exon 4 | − | chr2: 60461168-60461193 | CCACCUGGCCGAGGCCGAG | 1040 |
| | | | | | GGCCAC | |
| 53335_4_488 | BCL11a | Exon 4 | − | chr2: 60461175-60461200 | AGCGCGGCCACCUGGCCGA | 1041 |
| | | | | | GGCCGA | |
| 53335_4_489 | BCL11a | Exon 4 | − | chr2: 60461176-60461201 | AAGCGCGGCCACCUGGCCG | 1042 |
| | | | | | AGGCCG | |
| 53335_4_490 | BCL11a | Exon 4 | − | chr2: 60461182-60461207 | AAGCAUAAGCGCGGCCACC | 1043 |
| | | | | | UGGCCG | |
| 53335_4_491 | BCL11a | Exon 4 | − | chr2: 60461188-60461213 | GGCGAGAAGCAUAAGCGCG | 1044 |
| | | | | | GCCACC | |
| 53335_4_492 | BCL11a | Exon 4 | − | chr2: 60461196-60461221 | AGGUCCUGGGCGAGAAGCA | 1045 |
| | | | | | UAAGCG | |
| 53335_4_493 | BCL11a | Exon 4 | − | chr2: 60461214-60461239 | UCAGCGAGGCCUUCCACCA | 1046 |
| | | | | | GGUCCU | |
| 53335_4_494 | BCL11a | Exon 4 | − | chr2: 60461215-60461240 | UUCAGCGAGGCCUUCCACC | 1047 |
| | | | | | AGGUCC | |
| 53335_4_495 | BCL11a | Exon 4 | − | chr2: 60461221-60461246 | CAGCACUUCAGCGAGGCCU | 1048 |
| | | | | | UCCACC | |
| 53335_4_496 | BCL11a | Exon 4 | − | chr2: 60461233-60461258 | CUCAGCUCCAUGCAGCACU | 1049 |
| | | | | | UCAGCG | |
| 53335_4_497 | BCL11a | Exon 4 | − | chr2: 60461263-60461288 | GCCCUGCCCGACGUCAUGC | 1050 |
| | | | | | AGGGCA | |
| 53335_4_498 | BCL11a | Exon 4 | − | chr2: 60461268-60461293 | GCCGCGCCCUGCCCGACGU | 1051 |
| | | | | | CAUGCA | |
| 53335_4_499 | BCL11a | Exon 4 | − | chr2: 60461269-60461294 | AGCCGCGCCCUGCCCGACG | 1052 |
| | | | | | UCAUGC | |
| 53335_4_500 | BCL11a | Exon 4 | − | chr2: 60461304-60461329 | GCUCGCGGGGCGCGGUCGU | 1053 |
| | | | | | GGGCGU | |
| 53335_4_501 | BCL11a | Exon 4 | − | chr2: 60461305-60461330 | AGCUCGCGGGGCGCGGUCG | 1054 |
| | | | | | UGGGCG | |
| 53335_4_502 | BCL11a | Exon 4 | − | chr2: 60461310-60461335 | AGAACAGCUCGCGGGGCGC | 1055 |
| | | | | | GGUCGU | |
| 53335_4_503 | BCL11a | Exon 4 | − | chr2: 60461311-60461336 | GAGAACAGCUCGCGGGGCG | 1056 |
| | | | | | CGGUCG | |
| 53335_4_504 | BCL11a | Exon 4 | − | chr2: 60461317-60461342 | CACCACGAGAACAGCUCGC | 1057 |
| | | | | | GGGGCG | |
| 53335_4_505 | BCL11a | Exon 4 | − | chr2: 60461322-60461347 | CGCGCCACCACGAGAACAG | 1058 |
| | | | | | CUCGCG | |
| 53335_4_506 | BCL11a | Exon 4 | − | chr2: 60461323-60461348 | GCGCGCCACCACGAGAACA | 1059 |
| | | | | | GCUCGC | |
| 53335_4_507 | BCL11a | Exon 4 | − | chr2: 60461324-60461349 | GGCGCGCCACCACGAGAAC | 1060 |
| | | | | | AGCUCG | |
| 53335_4_508 | BCL11a | Exon 4 | − | chr2: 60461350-60461375 | UACGGCUUCGGGCUGAGCC | 1061 |
| | | | | | UGGAGG | |
| 53335_4_509 | BCL11a | Exon 4 | − | chr2: 60461353-60461378 | GACUACGGCUUCGGGCUGA | 1062 |
| | | | | | GCCUGG | |
| 53335_4_510 | BCL11a | Exon 4 | − | chr2: 60461356-60461381 | CUGGACUACGGCUUCGGGC | 1063 |
| | | | | | UGAGCC | |
| 53335_4_511 | BCL11a | Exon 4 | − | chr2: 60461366-60461391 | CUCGCUCUCCCUGGACUAC | 1064 |
| | | | | | GGCUUC | |
| 53335_4_512 | BCL11a | Exon 4 | − | chr2: 60461367-60461392 | UCUCGCUCUCCCUGGACUA | 1065 |
| | | | | | CGGCUU | |
| 53335_4_513 | BCL11a | Exon 4 | − | chr2: 60461373-60461398 | ACUGCCUCUCGCUCUCCCU | 1066 |
| | | | | | GGACUA | |
| 53335_4_514 | BCL11a | Exon 4 | − | chr2: 60461380-60461405 | CUCCUCGACUGCCUCUCGC | 1067 |
| | | | | | UCUCCC | |
| 53335_4_515 | BCL11a | Exon 4 | − | chr2: 60461512-60461537 | GCCAGCAGCGCGCUCAAGU | 1068 |
| | | | | | CCGUGG | |
| 53335_4_516 | BCL11a | Exon 4 | − | chr2: 60461515-60461540 | AGCGCCAGCAGCGCGCUCA | 1069 |
| | | | | | AGUCCG | |
| 53335_4_517 | BCL11a | Exon 4 | − | chr2: 60461544-60461569 | CGGAACCCGGCACCAGCGA | 1070 |
| | | | | | CUUGGU | |
| 53335_4_518 | BCL11a | Exon 4 | − | chr2: 60461545-60461570 | CCGGAACCCGGCACCAGCG | 1071 |
| | | | | | ACUUGG | |
| 53335_4_519 | BCL11a | Exon 4 | − | chr2: 60461548-60461573 | UCCCCGGAACCCGGCACCA | 1072 |
| | | | | | GCGACU | |
| 53335_4_520 | BCL11a | Exon 4 | − | chr2: 60461562-60461587 | UCUCCACCGCCAGCUCCCCG | 1073 |
| | | | | | GAACC | |
| 53335_4_521 | BCL11a | Exon 4 | − | chr2: 60461569-60461594 | GACGGUCUCUCCACCGCCA | 1074 |
| | | | | | GCUCCC | |
| 53335_4_522 | BCL11a | Exon 4 | − | chr2: 60461592-60461617 | CCCCCAUGACGGUCAAGUC | 1075 |
| | | | | | CGACGA | |
| 53335_4_523 | BCL11a | Exon 4 | − | chr2: 60461608-60461633 | CACAUGCACAAAUCGUCCC | 1076 |
| | | | | | CCAUGA | |
| 53335_4_524 | BCL11a | Exon 4 | − | chr2: 60461665-60461690 | AACCUGUGCGACCACGCGU | 1077 |
| | | | | | GCACCC | |
| 53335_4_525 | BCL11a | Exon 4 | − | chr2: 60461712-60461737 | UGGUGGUGCACCGGCGCAG | 1078 |
| | | | | | CCACAC | |
| 53335_4_526 | BCL11a | Exon 4 | − | chr2: 60461713-60461738 | CUGGUGGUGCACCGGCGCA | 1079 |
| | | | | | GCCACA | |
| 53335_4_527 | BCL11a | Exon 4 | − | chr2: 60461726-60461751 | AUUUCAGAGCAACCUGGUG | 1080 |
| | | | | | GUGCAC | |
| 53335_4_528 | BCL11a | Exon 4 | − | chr2: 60461734-60461759 | ACGUUCAAAUUUCAGAGCA | 1081 |
| | | | | | ACCUGG | |
| 53335_4_529 | BCL11a | Exon 4 | − | chr2: 60461737-60461762 | AAGACGUUCAAAUUUCAGA | 1082 |
| | | | | | GCAACC | |
| 53335_4_530 | BCL11a | Exon 4 | − | chr2: 60461766-60461791 | UCAAGUCCAAGUCAUGCGA | 1083 |
| | | | | | GUUCUG | |
| 53335_4_531 | BCL11a | Exon 4 | − | chr2: 60461794-60461819 | UCCGCCCCUCCUCCCUCCCA | 1084 |
| | | | | | GCCCC | |
| 53335_4_532 | BCL11a | Exon 4 | − | chr2: 60461848-60461873 | CAGCCAGGUAGCAAGCCGC | 1085 |
| | | | | | CCUUCC | |
| 53335_4_533 | BCL11a | Exon 4 | − | chr2: 60461868-60461893 | AAAGGUUACUGCAACCAUU | 1086 |
| | | | | | CCAGCC | |
| 53335_4_534 | BCL11a | Exon 4 | − | chr2: 60461891-60461916 | CCCAGGCCGGCCCAGCCCU | 1087 |
| | | | | | AUGCAA | |
| 53335_4_535 | BCL11a | Exon 4 | − | chr2: 60461909-60461934 | GUCUAGCCCACCGCUGUCC | 1088 |
| | | | | | CCAGGC | |
| 53335_4_536 | BCL11a | Exon 4 | − | chr2: 60461913-60461938 | ACACGUCUAGCCCACCGCU | 1089 |
| | | | | | GUCCCC | |
| 53335_4_537 | BCL11a | Exon 4 | − | chr2: 60461942-60461967 | CUCUAGGAGACUUAGAGAG | 1090 |
| | | | | | CUGGCA | |
| 53335_4_538 | BCL11a | Exon 4 | − | chr2: 60461943-60461968 | UCUCUAGGAGACUUAGAGA | 1091 |
| | | | | | GCUGGC | |
| 53335_4_539 | BCL11a | Exon 4 | − | chr2: 60461947-60461972 | GAUUUCUCUAGGAGACUUA | 1092 |
| | | | | | GAGAGC | |
| 53335_4_540 | BCL11a | Exon 4 | − | chr2: 60461963-60461988 | GGAGCCUCCCGCCAUGGAU | 1093 |
| | | | | | UUCUCU | |
| 53335_4_541 | BCL11a | Exon 4 | − | chr2: 60461974-60461999 | CCAAUGGCUAUGGAGCCUC | 1094 |
| | | | | | CCGCCA | |
| 53335_4_542 | BCL11a | Exon 4 | − | chr2: 60461989-60462014 | GUGCUGCGGUUGAAUCCAA | 1095 |
| | | | | | UGGCUA | |
| 53335_4_543 | BCL11a | Exon 4 | − | chr2: 60461995-60462020 | GACAGGGUGCUGCGGUUGA | 1096 |
| | | | | | AUCCAA | |
| 53335_4_544 | BCL11a | Exon 4 | − | chr2: 60462008-60462033 | CCCGAGUGCCUUUGACAGG | 1097 |
| | | | | | GUGCUG | |
| 53335_4_545 | BCL11a | Exon 4 | − | chr2: 60462016-60462041 | ACCCAUCACCCGAGUGCCU | 1098 |
| | | | | | UUGACA | |
| 53335_4_546 | BCL11a | Exon 4 | − | chr2: 60462017-60462042 | CACCCAUCACCCGAGUGCC | 1099 |
| | | | | | UUUGAC | |
| 53335_4_547 | BCL11a | Exon 4 | − | chr2: 60462046-60462071 | CGCCUGGGGGCGGAAGAGA | 1100 |
| | | | | | UGGCCC | |
| 53335_4_548 | BCL11a | Exon 4 | − | chr2: 60462052-60462077 | AUAGAGCGCCUGGGGGCGG | 1101 |
| | | | | | AAGAGA | |
| 53335_4_549 | BCL11a | Exon 4 | − | chr2: 60462061-60462086 | CCCCACCGCAUAGAGCGCC | 1102 |
| | | | | | UGGGGG | |
| 53335_4_550 | BCL11a | Exon 4 | − | chr2: 60462064-60462089 | GACCCCCACCGCAUAGAGC | 1103 |
| | | | | | GCCUGG | |
| 53335_4_551 | BCL11a | Exon 4 | − | chr2: 60462065-60462090 | GGACCCCCACCGCAUAGAG | 1104 |
| | | | | | CGCCUG | |
| 53335_4_552 | BCL11a | Exon 4 | − | chr2: 60462066-60462091 | UGGACCCCCACCGCAUAGA | 1105 |
| | | | | | GCGCCU | |
| 53335_4_553 | BCL11a | Exon 4 | − | chr2: 60462067-60462092 | UUGGACCCCCACCGCAUAG | 1106 |
| | | | | | AGCGCC | |
| 53335_4_554 | BCL11a | Exon 4 | − | chr2: 60462091-60462116 | UUUAGUCCACCACCGAGAC | 1107 |
| | | | | | AUCACU | |
| 53335_4_555 | BCL11a | Exon 4 | − | chr2: 60462143-60462168 | GAGAGAGGCUUCCGGCCUG | 1108 |
| | | | | | GCAGAA | |
| 53335_4_556 | BCL11a | Exon 4 | − | chr2: 60462144-60462169 | CGAGAGAGGCUUCCGGCCU | 1109 |
| | | | | | GGCAGA | |
| 53335_4_557 | BCL11a | Exon 4 | − | chr2: 60462151-60462176 | UCAGUAUCGAGAGAGGCUU | 1110 |
| | | | | | CCGGCC | |
| 53335_4_558 | BCL11a | Exon 4 | − | chr2: 60462156-60462181 | CAGGAUCAGUAUCGAGAGA | 1111 |
| | | | | | GGCUUC | |
| 53335_4_559 | BCL11a | Exon 4 | − | chr2: 60462163-60462188 | AGAAUACCAGGAUCAGUAU | 1112 |
| | | | | | CGAGAG | |
| 53335_4_560 | BCL11a | Exon 4 | − | chr2: 60462180-60462205 | ACCCCUUUAACCUGCUAAG | 1113 |
| | | | | | AAUACC | |
| 53335_4_561 | BCL11a | Exon 4 | − | chr2: 60462227-60462252 | AUGUCCUUCCCAGCCACCU | 1114 |
| | | | | | CUCCAU | |
| 53335_4_562 | BCL11a | Exon 4 | − | chr2: 60462228-60462253 | AAUGUCCUUCCCAGCCACC | 1115 |
| | | | | | UCUCCA | |
| 53335_4_563 | BCL11a | Exon 4 | − | chr2: 60462261-60462286 | CGCGGGUUGGUAUCCCUUC | 1116 |
| | | | | | AGGACU | |
| 53335_4_564 | BCL11a | Exon 4 | − | chr2: 60462267-60462292 | UGACCCCGCGGGUUGGUAU | 1117 |
| | | | | | CCCUUC | |
| 53335_4_565 | BCL11a | Exon 4 | − | chr2: 60462279-60462304 | ACGGAAGUCCCCUGACCCC | 1118 |
| | | | | | GCGGGU | |
| 53335_4_566 | BCL11a | Exon 4 | − | chr2: 60462283-60462308 | GAACACGGAAGUCCCCUGA | 1119 |
| | | | | | CCCCGC | |
| 53335_4_567 | BCL11a | Exon 4 | − | chr2: 60462284-60462309 | CGAACACGGAAGUCCCCUG | 1120 |
| | | | | | ACCCCG | |
| 53335_4_568 | BCL11a | Exon 4 | − | chr2: 60462303-60462328 | UAAGAAUCUACUUAGAAAG | 1121 |
| | | | | | CGAACA | |
| 53335_4_569 | BCL11a | Exon 4 | − | chr2: 60462333-60462358 | UCUUGCAACACGCACAGAA | 1122 |
| | | | | | CACUCA | |
| 53335_4_570 | BCL11a | Exon 4 | − | chr2: 60462365-60462390 | UUGCAAACAGCCAUUCACC | 1123 |
| | | | | | AGUGCA | |
| 53335_3_1 | BCL11a | Exon 3 | + | chr2: 60468716-60468741 | UAAGGCUCAACUUACAAAU | 1124 |
| | | | | | ACCCUG | |
| 53335_3_2 | BCL11a | Exon 3 | + | chr2: 60468717-60468742 | AAGGCUCAACUUACAAAUA | 1125 |
| | | | | | CCCUGC | |
| 53335_3_3 | BCL11a | Exon 3 | + | chr2: 60468718-60468743 | AGGCUCAACUUACAAAUAC | 1126 |
| | | | | | CCUGCG | |
| 53335_3_4 | BCL11a | Exon 3 | + | chr2: 60468740-60468765 | GCGGGGCAUAUUCUGCACU | 1127 |
| | | | | | CAUCCC | |
| 53335_3_5 | BCL11a | Exon 3 | + | chr2: 60468745-60468770 | GCAUAUUCUGCACUCAUCC | 1128 |
| | | | | | CAGGCG | |
| 53335_3_6 | BCL11a | Exon 3 | + | chr2: 60468746-60468771 | CAUAUUCUGCACUCAUCCC | 1129 |
| | | | | | AGGCGU | |
| 53335_3_7 | BCL11a | Exon 3 | + | chr2: 60468747-60468772 | AUAUUCUGCACUCAUCCCA | 1130 |
| | | | | | GGCGUG | |
| 53335_3_8 | BCL11a | Exon 3 | + | chr2: 60468773-60468798 | GGAUUAGAGCUCCAUGUGC | 1131 |
| | | | | | AGAACG | |
| 53335_3_9 | BCL11a | Exon 3 | + | chr2: 60468774-60468799 | GAUUAGAGCUCCAUGUGCA | 1132 |
| | | | | | GAACGA | |
| 53335_3_10 | BCL11a | Exon 3 | + | chr2: 60468775-60468800 | AUUAGAGCUCCAUGUGCAG | 1133 |
| | | | | | AACGAG | |
| 53335_3_11 | BCL11a | Exon 3 | + | chr2: 60468778-60468803 | AGAGCUCCAUGUGCAGAAC | 1134 |
| | | | | | GAGGGG | |
| 53335_3_12 | BCL11a | Exon 3 | + | chr2: 60468783-60468808 | UCCAUGUGCAGAACGAGGG | 1135 |
| | | | | | GAGGAG | |
| 53335_3_13 | BCL11a | Exon 3 | − | chr2: 60468739-60468764 | GGAUGAGUGCAGAAUAUGC | 1136 |
| | | | | | CCCGCA | |
| 53335_3_14 | BCL11a | Exon 3 | − | chr2: 60468740-60468765 | GGGAUGAGUGCAGAAUAUG | 1137 |
| | | | | | CCCCGC | |
| 53335_3_15 | BCL11a | Exon 3 | − | chr2: 60468765-60468790 | ACAUGGAGCUCUAAUCCCC | 1138 |
| | | | | | ACGCCU | |
| 53335_3_16 | BCL11a | Exon 3 | − | chr2: 60468766-60468791 | CACAUGGAGCUCUAAUCCC | 1139 |
| | | | | | CACGCC | |
| 53335_3_17 | BCL11a | Exon 3 | − | chr2: 60468787-60468812 | GCCUCUCCUCCCCUCGUUC | 1140 |
| | | | | | UGCACA | |
| 53335_3_18 | BCL11a | Exon 3 | − | chr2: 60468814-60468839 | UCACAGAUAAACUUCUGCA | 1141 |
| | | | | | CUGGAG | |
| 53335_3_19 | BCL11a | Exon 3 | − | chr2: 60468815-60468840 | UUCACAGAUAAACUUCUGC | 1142 |
| | | | | | ACUGGA | |
| 53335_3_20 | BCL11a | Exon 3 | − | chr2: 60468816-60468841 | UUUCACAGAUAAACUUCUG | 1143 |
| | | | | | CACUGG | |
| 53335_3_21 | BCL11a | Exon 3 | − | chr2: 60468819-60468844 | UUCUUUCACAGAUAAACUU | 1144 |
| | | | | | CUGCAC | |
| 53335_2_1 | BCL11a | Exon 2 | + | chr2: 60545963-60545988 | CAUUUACCUGCUAUGUGUU | 1145 |
| | | | | | CCUGUU | |
| 53335_2_2 | BCL11a | Exon 2 | + | chr2: 60545964-60545989 | AUUUACCUGCUAUGUGUUC | 1146 |
| | | | | | CUGUUU | |
| 53335_2_3 | BCL11a | Exon 2 | + | chr2: 60545965-60545990 | UUUACCUGCUAUGUGUUCC | 1147 |
| | | | | | UGUUUG | |
| 53335_2_4 | BCL11a | Exon 2 | + | chr2: 60546009-60546034 | ACGUUGAUAAACAAUCGUC | 1148 |
| | | | | | AUCCUC | |
| 53335_2_5 | BCL11a | Exon 2 | + | chr2: 60546019-60546044 | ACAAUCGUCAUCCUCUGGC | 1149 |
| | | | | | GUGACC | |
| 53335_2_6 | BCL11a | Exon 2 | + | chr2: 60546035-60546060 | GGCGUGACCUGGAUGCCAA | 1150 |
| | | | | | CCUCCA | |
| 53335_2_7 | BCL11a | Exon 2 | + | chr2: 60546036-60546061 | GCGUGACCUGGAUGCCAAC | 1151 |
| | | | | | CUCCAC | |
| 53335_2_8 | BCL11a | Exon 2 | + | chr2: 60546041-60546066 | ACCUGGAUGCCAACCUCCA | 1152 |
| | | | | | CGGGAU | |
| 53335_2_9 | BCL11a | Exon 2 | + | chr2: 60546063-60546088 | GAUUGGAUGCUUUUUUCAU | 1153 |
| | | | | | CUCGAU | |
| 53335_2_10 | BCL11a | Exon 2 | + | chr2: 60546069-60546094 | AUGCUUUUUUCAUCUCGAU | 1154 |
| | | | | | UGGUGA | |
| 53335_2_11 | BCL11a | Exon 2 | + | chr2: 60546070-60546095 | UGCUUUUUUCAUCUCGAUU | 1155 |
| | | | | | GGUGAA | |
| 53335_2_12 | BCL11a | Exon 2 | + | chr2: 60546071-60546096 | GCUUUUUUCAUCUCGAUUG | 1156 |
| | | | | | GUGAAG | |
| 53335_2_13 | BCL11a | Exon 2 | + | chr2: 60546075-60546100 | UUUUCAUCUCGAUUGGUGA | 1157 |
| | | | | | AGGGGA | |
| 53335_2_14 | BCL11a | Exon 2 | + | chr2: 60546078-60546103 | UCAUCUCGAUUGGUGAAGG | 1158 |
| | | | | | GGAAGG | |
| 53335_2_15 | BCL11a | Exon 2 | + | chr2: 60546106-60546131 | CUUAUCCACAGCUUUUUCU | 1159 |
| | | | | | AAGCAG | |
| 53335_2_16 | BCL11a | Exon 2 | + | chr2: 60546162-60546187 | CGAUAAAAAUAAGAAUGUC | 1160 |
| | | | | | CCCCAA | |
| 53335_2_17 | BCL11a | Exon 2 | + | chr2: 60546163-60546188 | GAUAAAAAUAAGAAUGUCC | 1161 |
| | | | | | CCCAAU | |
| 53335_2_18 | BCL11a | Exon 2 | + | chr2: 60546175-60546200 | AAUGUCCCCCAAUGGGAAG | 1162 |
| | | | | | UUCAUC | |
| 53335_2_19 | BCL11a | Exon 2 | + | chr2: 60546188-60546213 | GGGAAGUUCAUCUGGCACU | 1163 |
| | | | | | GCCCAC | |
| 53335_2_20 | BCL11a | Exon 2 | + | chr2: 60546193-60546218 | GUUCAUCUGGCACUGCCCA | 1164 |
| | | | | | CAGGUG | |
| 53335_2_21 | BCL11a | Exon 2 | + | chr2: 60546196-60546221 | CAUCUGGCACUGCCCACAG | 1165 |
| | | | | | GUGAGG | |
| 53335_2_22 | BCL11a | Exon 2 | + | chr2: 60546213-60546238 | AGGUGAGGAGGUCAUGAUC | 1166 |
| | | | | | CCCUUC | |
| 53335_2_23 | BCL11a | Exon 2 | + | chr2: 60546225-60546250 | CAUGAUCCCCUUCUGGAGC | 1167 |
| | | | | | UCCCAA | |
| 53335_2_24 | BCL11a | Exon 2 | + | chr2: 60546226-60546251 | AUGAUCCCCUUCUGGAGCU | 1168 |
| | | | | | CCCAAC | |
| 53335_2_25 | BCL11a | Exon 2 | + | chr2: 60546232-60546257 | CCCUUCUGGAGCUCCCAAC | 1169 |
| | | | | | GGGCCG | |
| 53335_2_26 | BCL11a | Exon 2 | + | chr2: 60546237-60546262 | CUGGAGCUCCCAACGGGCC | 1170 |
| | | | | | GUGGUC | |
| 53335_2_27 | BCL11a | Exon 2 | + | chr2: 60546257-60546282 | UGGUCUGGUUCAUCAUCUG | 1171 |
| | | | | | UAAGAA | |
| 53335_2_28 | BCL11a | Exon 2 | + | chr2: 60546267-60546292 | CAUCAUCUGUAAGAAUGGC | 1172 |
| | | | | | UUCAAG | |
| 53335_2_29 | BCL11a | Exon 2 | + | chr2: 60546272-60546297 | UCUGUAAGAAUGGCUUCAA | 1173 |
| | | | | | GAGGCU | |
| 53335_2_30 | BCL11a | Exon 2 | + | chr2: 60546278-60546303 | AGAAUGGCUUCAAGAGGCU | 1174 |
| | | | | | CGGCUG | |
| 53335_2_31 | BCL11a | Exon 2 | + | chr2: 60546282-60546307 | UGGCUUCAAGAGGCUCGGC | 1175 |
| | | | | | UGUGGU | |
| 53335_2_32 | BCL11a | Exon 2 | − | chr2: 60545956-60545981 | ACACAUAGCAGGUAAAUGA | 1176 |
| | | | | | GAAGCA | |
| 53335_2_33 | BCL11a | Exon 2 | − | chr2: 60545972-60545997 | UUUGCCCCAAACAGGAACA | 1177 |
| | | | | | CAUAGC | |
| 53335_2_34 | BCL11a | Exon 2 | − | chr2: 60545985-60546010 | UCAUCUAGAGGAAUUUGCC | 1178 |
| | | | | | CCAAAC | |
| 53335_2_35 | BCL11a | Exon 2 | − | chr2: 60546002-60546027 | ACGAUUGUUUAUCAACGUC | 1179 |
| | | | | | AUCUAG | |
| 53335_2_36 | BCL11a | Exon 2 | − | chr2: 60546033-60546058 | GAGGUUGGCAUCCAGGUCA | 1180 |
| | | | | | CGCCAG | |
| 53335_2_37 | BCL11a | Exon 2 | − | chr2: 60546045-60546070 | UCCAAUCCCGUGGAGGUUG | 1181 |
| | | | | | GCAUCC | |
| 53335_2_38 | BCL11a | Exon 2 | − | chr2: 60546053-60546078 | AAAAAGCAUCCAAUCCCGU | 1182 |
| | | | | | GGAGGU | |
| 53335_2_39 | BCL11a | Exon 2 | − | chr2: 60546057-60546082 | AUGAAAAAAGCAUCCAAUC | 1183 |
| | | | | | CCGUGG | |
| 53335_2_40 | BCL11a | Exon 2 | − | chr2: 60546060-60546085 | GAGAUGAAAAAAGCAUCCA | 1184 |
| | | | | | AUCCCG | |
| 53335_2_41 | BCL11a | Exon 2 | − | chr2: 60546114-60546139 | GGCAGCCUCUGCUUAGAAA | 1185 |
| | | | | | AAGCUG | |
| 53335_2_42 | BCL11a | Exon 2 | − | chr2: 60546140-60546165 | UCGAGCACAAACGGAAACA | 1186 |
| | | | | | AUGCAA | |
| 53335_2_43 | BCL11a | Exon 2 | − | chr2: 60546154-60546179 | CAUUCUUAUUUUUAUCGAG | 1187 |
| | | | | | CACAAA | |
| 53335_2_44 | BCL11a | Exon 2 | − | chr2: 60546183-60546208 | CAGUGCCAGAUGAACUUCC | 1188 |
| | | | | | CAUUGG | |
| 53335_2_45 | BCL11a | Exon 2 | − | chr2: 60546184-60546209 | GCAGUGCCAGAUGAACUUC | 1189 |
| | | | | | CCAUUG | |
| 53335_2_46 | BCL11a | Exon 2 | − | chr2: 60546185-60546210 | GGCAGUGCCAGAUGAACUU | 1190 |
| | | | | | CCCAUU | |
| 53335_2_47 | BCL11a | Exon 2 | − | chr2: 60546186-60546211 | GGGCAGUGCCAGAUGAACU | 1191 |
| | | | | | UCCCAU | |
| 53335_2_48 | BCL11a | Exon 2 | − | chr2: 60546211-60546236 | AGGGGAUCAUGACCUCCUC | 1192 |
| | | | | | ACCUGU | |
| 53335_2_49 | BCL11a | Exon 2 | − | chr2: 60546212-60546237 | AAGGGGAUCAUGACCUCCU | 1193 |
| | | | | | CACCUG | |
| 53335_2_50 | BCL11a | Exon 2 | − | chr2: 60546234-60546259 | CACGGCCCGUUGGGAGCUC | 1194 |
| | | | | | CAGAAG | |
| 53335_2_51 | BCL11a | Exon 2 | − | chr2: 60546235-60546260 | CCACGGCCCGUUGGGAGCU | 1195 |
| | | | | | CCAGAA | |
| 53335_2_52 | BCL11a | Exon 2 | − | chr2: 60546236-60546261 | ACCACGGCCCGUUGGGAGC | 1196 |
| | | | | | UCCAGA | |
| 53335_2_53 | BCL11a | Exon 2 | − | chr2: 60546248-60546273 | AUGAUGAACCAGACCACGG | 1197 |
| | | | | | CCCGUU | |
| 53335_2_54 | BCL11a | Exon 2 | − | chr2: 60546249-60546274 | GAUGAUGAACCAGACCACG | 1198 |
| | | | | | GCCCGU | |
| 53335_2_55 | BCL11a | Exon 2 | − | chr2: 60546257-60546282 | UUCUUACAGAUGAUGAACC | 1199 |
| | | | | | AGACCA | |
| 53335_1_1 | BCL11a | Exon 1 | + | chr2: 60553216-60553241 | CGAGAAUUCCCGUUUGCUU | 1200 |
| | | | | | AAGUGC | |
| 53335_1_2 | BCL11a | Exon 1 | + | chr2: 60553217-60553242 | GAGAAUUCCCGUUUGCUUA | 1201 |
| | | | | | AGUGCU | |
| 53335_1_3 | BCL11a | Exon 1 | + | chr2: 60553218-60553243 | AGAAUUCCCGUUUGCUUAA | 1202 |
| | | | | | GUGCUG | |
| 53335_1_4 | BCL11a | Exon 1 | + | chr2: 60553234-60553259 | UAAGUGCUGGGGUUUGCCU | 1203 |
| | | | | | UGCUUG | |
| 53335_1_5 | BCL11a | Exon 1 | + | chr2: 60553244-60553269 | GGUUUGCCUUGCUUGCGGC | 1204 |
| | | | | | GAGACA | |
| 53335_1_6 | BCL11a | Exon 1 | + | chr2: 60553247-60553272 | UUGCCUUGCUUGCGGCGAG | 1205 |
| | | | | | ACAUGG | |
| 53335_1_7 | BCL11a | Exon 1 | + | chr2: 60553248-60553273 | UGCCUUGCUUGCGGCGAGA | 1206 |
| | | | | | CAUGGU | |
| 53335_1_8 | BCL11a | Exon 1 | + | chr2: 60553254-60553279 | GCUUGCGGCGAGACAUGGU | 1207 |
| | | | | | GGGCUG | |
| 53335_1_9 | BCL11a | Exon 1 | + | chr2: 60553255-60553280 | CUUGCGGCGAGACAUGGUG | 1208 |
| | | | | | GGCUGC | |
| 53335_1_10 | BCL11a | Exon 1 | + | chr2: 60553256-60553281 | UUGCGGCGAGACAUGGUGG | 1209 |
| | | | | | GCUGCG | |
| 53335_1_11 | BCL11a | Exon 1 | + | chr2: 60553291-60553316 | CGGCGGCGGCGGCGGCGGC | 1210 |
| | | | | | GGCGGG | |
| 53335_1_12 | BCL11a | Exon 1 | + | chr2: 60553298-60553323 | GGCGGCGGCGGCGGCGGGC | 1211 |
| | | | | | GGACGA | |
| 53335_1_13 | BCL11a | Exon 1 | + | chr2: 60553303-60553328 | CGGCGGCGGCGGGCGGACG | 1212 |
| | | | | | ACGGCU | |
| 53335_1_14 | BCL11a | Exon 1 | + | chr2: 60553313-60553338 | GGGCGGACGACGGCUCGGU | 1213 |
| | | | | | UCACAU | |
| 53335_1_15 | BCL11a | Exon 1 | + | chr2: 60553314-60553339 | GGCGGACGACGGCUCGGUU | 1214 |
| | | | | | CACAUC | |
| 53335_1_16 | BCL11a | Exon 1 | + | chr2: 60553322-60553347 | ACGGCUCGGUUCACAUCGG | 1215 |
| | | | | | GAGAGC | |
| 53335_1_17 | BCL11a | Exon 1 | + | chr2: 60553323-60553348 | CGGCUCGGUUCACAUCGGG | 1216 |
| | | | | | AGAGCC | |
| 53335_1_18 | BCL11a | Exon 1 | + | chr2: 60553335-60553360 | CAUCGGGAGAGCCGGGUUA | 1217 |
| | | | | | GAAAGA | |
| 53335_1_19 | BCL11a | Exon 1 | + | chr2: 60553406-60553431 | AAAUAAAUUAGAAAUAAUA | 1218 |
| | | | | | CAAAGA | |
| 53335_1_20 | BCL11a | Exon 1 | + | chr2: 60553412-60553437 | AUUAGAAAUAAUACAAAGA | 1219 |
| | | | | | UGGCGC | |
| 53335_1_21 | BCL11a | Exon 1 | + | chr2: 60553413-60553438 | UUAGAAAUAAUACAAAGAU | 1220 |
| | | | | | GGCGCA | |
| 53335_1_22 | BCL11a | Exon 1 | + | chr2: 60553427-60553452 | AAGAUGGCGCAGGGAAGAU | 1221 |
| | | | | | GAAUUG | |
| 53335_1_23 | BCL11a | Exon 1 | + | chr2: 60553428-60553453 | AGAUGGCGCAGGGAAGAUG | 1222 |
| | | | | | AAUUGU | |
| 53335_1_24 | BCL11a | Exon 1 | + | chr2: 60553441-60553466 | AAGAUGAAUUGUGGGAGAG | 1223 |
| | | | | | CCGUCA | |
| 53335_1_25 | BCL11a | Exon 1 | − | chr2: 60553227-60553252 | GGCAAACCCCAGCACUUAA | 1224 |
| | | | | | GCAAAC | |
| 53335_1_26 | BCL11a | Exon 1 | − | chr2: 60553228-60553253 | AGGCAAACCCCAGCACUUA | 1225 |
| | | | | | AGCAAA | |
| 53335_1_27 | BCL11a | Exon 1 | − | chr2: 60553253-60553278 | AGCCCACCAUGUCUCGCCG | 1226 |
| | | | | | CAAGCA | |
| 53335_1_28 | BCL11a | Exon 1 | − | chr2: 60553349-60553374 | CUCUGGAGUCUCCUUCUUU | 1227 |
| | | | | | CUAACC | |
| 53335_1_29 | BCL11a | Exon 1 | − | chr2: 60553371-60553396 | AAGGCACUGAUGAAGAUAU | 1228 |
| | | | | | UUUCUC | |
| 53335_1_30 | BCL11a | Exon 1 | − | chr2: 60553395-60553420 | UUUCUAAUUUAUUUUGGAU | 1229 |
| | | | | | GUCAAA | |
| 53335_1_31 | BCL11a | Exon 1 | − | chr2: 60553406-60553431 | UCUUUGUAUUAUUUCUAAU | 1230 |
| | | | | | UUAUUU | |
| 53335_1_32 | BCL11a | Exon 1 | − | chr2: 60553463-60553488 | AAAAAAGCUUAAAAAAAAG | 1231 |
| | | | | | CCAUGA | |

TABLE 2
gRNA targeting domains targeting BCL11a Intron 2 (e.g., to a BCL11a Enhancer)

| | | | | | | SEQ |
|---|---|---|---|---|---|---|
| | | Target | | Targeting Site | | ID |
| Id. | Target | Region | Strand | (hg38) | gRNA Targeting Domain | NO: |
| 53335_I2_1 | BCL11a | Intron 2 | + | chr2: 60494277-60494302 | GGGAGUUUGGCUUCUCA | 1232 |
| | | | | | UCUGUGCA | |
| 53335_I2_2 | BCL11a | Intron 2 | + | chr2: 60494289-60494314 | UCUCAUCUGUGCAUGGC | 1233 |
| | | | | | CUCUAAAC | |
| 53335_I2_3 | BCL11a | Intron 2 | + | chr2: 60494290-60494315 | CUCAUCUGUGCAUGGCC | 1234 |
| | | | | | UCUAAACU | |
| 53335_I2_4 | BCL11a | Intron 2 | + | chr2: 60494302-60494327 | UGGCCUCUAAACUGGGC | 1235 |
| | | | | | AGUGACCA | |
| 53335_I2_5 | BCL11a | Intron 2 | + | chr2: 60494307-60494332 | UCUAAACUGGGCAGUGA | 1236 |
| | | | | | CCAUGGCC | |
| 53335_I2_6 | BCL11a | Intron 2 | + | chr2: 60494324-60494349 | CCAUGGCCUGGUCACCU | 1237 |
| | | | | | CCCCACUC | |
| 53335_I2_7 | BCL11a | Intron 2 | + | chr2: 60494330-60494355 | CCUGGUCACCUCCCCACU | 1238 |
| | | | | | CUGGACC | |
| 53335_I2_8 | BCL11a | Intron 2 | + | chr2: 60494331-60494356 | CUGGUCACCUCCCCACUC | 1239 |
| | | | | | UGGACCU | |
| 53335_I2_9 | BCL11a | Intron 2 | + | chr2: 60494351-60494376 | GACCUGGGUUGCCCCUC | 1240 |
| | | | | | UGUAAACA | |
| 53335_I2_10 | BCL11a | Intron 2 | + | chr2: 60494354-60494379 | CUGGGUUGCCCCUCUGU | 1241 |
| | | | | | AAACAAGG | |
| 53335_I2_11 | BCL11a | Intron 2 | + | chr2: 60494418-60494443 | AAAUCUUAUGCAAUUUU | 1242 |
| | | | | | UGCCAAGA | |
| 53335_I2_12 | BCL11a | Intron 2 | + | chr2: 60494419-60494444 | AAUCUUAUGCAAUUUUU | 1243 |
| | | | | | GCCAAGAU | |
| 53335_I2_13 | BCL11a | Intron 2 | + | chr2: 60494426-60494451 | UGCAAUUUUUGCCAAGA | 1244 |
| | | | | | UGGGAGUA | |
| 53335_I2_14 | BCL11a | Intron 2 | + | chr2: 60494427-60494452 | GCAAUUUUUGCCAAGAU | 1245 |
| | | | | | GGGAGUAU | |
| 53335_I2_15 | BCL11a | Intron 2 | + | chr2: 60494428-60494453 | CAAUUUUUGCCAAGAUG | 1246 |
| | | | | | GGAGUAUG | |
| 53335_I2_16 | BCL11a | Intron 2 | + | chr2: 60494440-60494465 | AGAUGGGAGUAUGGGGA | 1247 |
| | | | | | GAGAAGAG | |
| 53335_I2_17 | BCL11a | Intron 2 | + | chr2: 60494446-60494471 | GAGUAUGGGGAGAGAAG | 1248 |
| | | | | | AGUGGAAA | |
| 53335_I2_18 | BCL11a | Intron 2 | + | chr2: 60494477-60494502 | AGAGCUCAGUGAGAUGA | 1249 |
| | | | | | GAUAUCAA | |
| 53335_I2_19 | BCL11a | Intron 2 | + | chr2: 60494478-60494503 | GAGCUCAGUGAGAUGAG | 1250 |
| | | | | | AUAUCAAA | |
| 53335_I2_20 | BCL11a | Intron 2 | + | chr2: 60494479-60494504 | AGCUCAGUGAGAUGAGA | 1251 |
| | | | | | UAUCAAAG | |
| 53335_I2_21 | BCL11a | Intron 2 | + | chr2: 60494518-60494543 | UCAUUCCAUCUCCCUAA | 1252 |
| | | | | | UCUCCAAU | |
| 53335_I2_22 | BCL11a | Intron 2 | + | chr2: 60494533-60494558 | AAUCUCCAAUUGGCAAA | 1253 |
| | | | | | GCCAGACU | |
| 53335_I2_23 | BCL11a | Intron 2 | + | chr2: 60494534-60494559 | AUCUCCAAUUGGCAAAG | 1254 |
| | | | | | CCAGACUU | |
| 53335_I2_24 | BCL11a | Intron 2 | + | chr2: 60494535-60494560 | UCUCCAAUUGGCAAAGC | 1255 |
| | | | | | CAGACUUG | |
| 53335_I2_25 | BCL11a | Intron 2 | + | chr2: 60494548-60494573 | AAGCCAGACUUGGGGCA | 1256 |
| | | | | | AUACAGAC | |
| 53335_I2_26 | BCL11a | Intron 2 | + | chr2: 60494617-60494642 | UAUCACCAAAUGUUCUU | 1257 |
| | | | | | UCUUCAGC | |
| 53335_I2_27 | BCL11a | Intron 2 | + | chr2: 60494631-60494656 | CUUUCUUCAGCUGGAAU | 1258 |
| | | | | | UUAAAAUA | |
| 53335_I2_28 | BCL11a | Intron 2 | + | chr2: 60494649-60494674 | UAAAAUAUGGACUCAUC | 1259 |
| | | | | | CGUAAAAU | |
| 53335_I2_29 | BCL11a | Intron 2 | + | chr2: 60494675-60494700 | GGAAUAAUAAUAGUAUA | 1260 |
| | | | | | UGCUUCAU | |
| 53335_I2_30 | BCL11a | Intron 2 | + | chr2: 60494676-60494701 | GAAUAAUAAUAGUAUAU | 1261 |
| | | | | | GCUUCAUA | |
| 53335_I2_31 | BCL11a | Intron 2 | + | chr2: 60494766-60494791 | GCUUGUGAACUAAAAUG | 1262 |
| | | | | | CUGCCUCC | |
| 53335_I2_32 | BCL11a | Intron 2 | + | chr2: 60494806-60494831 | ACACCUCAGCAGAAACA | 1263 |
| | | | | | AAGUUAUC | |
| 53335_I2_33 | BCL11a | Intron 2 | + | chr2: 60494830-60494855 | CAGGCCCUUUCCCCAAU | 1264 |
| | | | | | UCCUAGUU | |
| 53335_I2_34 | BCL11a | Intron 2 | + | chr2: 60494831-60494856 | AGGCCCUUUCCCCAAUU | 1265 |
| | | | | | CCUAGUUU | |
| 53335_I2_35 | BCL11a | Intron 2 | + | chr2: 60494844-60494869 | AAUUCCUAGUUUGGGUC | 1266 |
| | | | | | AGAAGAAA | |
| 53335_I2_36 | BCL11a | Intron 2 | + | chr2: 60494845-60494870 | AUUCCUAGUUUGGGUCA | 1267 |
| | | | | | GAAGAAAA | |
| 53335_I2_37 | BCL11a | Intron 2 | + | chr2: 60494851-60494876 | AGUUUGGGUCAGAAGAA | 1268 |
| | | | | | AAGGGAAA | |
| 53335_I2_38 | BCL11a | Intron 2 | + | chr2: 60494852-60494877 | GUUUGGGUCAGAAGAAA | 1269 |
| | | | | | AGGGAAAA | |
| 53335_I2_39 | BCL11a | Intron 2 | + | chr2: 60494857-60494882 | GGUCAGAAGAAAAGGGA | 1270 |
| | | | | | AAAGGGAG | |
| 53335_I2_40 | BCL11a | Intron 2 | + | chr2: 60494864-60494889 | AGAAAAGGGAAAAGGGA | 1271 |
| | | | | | GAGGAAAA | |
| 53335_I2_41 | BCL11a | Intron 2 | + | chr2: 60494883-60494908 | GGAAAAAGGAAAAGAAU | 1272 |
| | | | | | AUGACGUC | |
| 53335_I2_42 | BCL11a | Intron 2 | + | chr2: 60494884-60494909 | GAAAAAGGAAAAGAAUA | 1273 |
| | | | | | UGACGUCA | |
| 53335_I2_43 | BCL11a | Intron 2 | + | chr2: 60494885-60494910 | AAAAAGGAAAAGAAUAU | 1274 |
| | | | | | GACGUCAG | |
| 53335_I2_44 | BCL11a | Intron 2 | + | chr2: 60494886-60494911 | AAAAGGAAAAGAAUAUG | 1275 |
| | | | | | ACGUCAGG | |
| 53335_I2_45 | BCL11a | Intron 2 | + | chr2: 60494889-60494914 | AGGAAAAGAAUAUGACG | 1276 |
| | | | | | UCAGGGGG | |
| 53335_I2_46 | BCL11a | Intron 2 | + | chr2: 60494901-60494926 | UGACGUCAGGGGGAGGC | 1277 |
| | | | | | AAGUCAGU | |
| 53335_I2_47 | BCL11a | Intron 2 | + | chr2: 60494902-60494927 | GACGUCAGGGGGAGGCA | 1278 |
| | | | | | AGUCAGUU | |
| 53335_I2_48 | BCL11a | Intron 2 | + | chr2: 60494928-60494953 | GGAACACAGAUCCUAAC | 1279 |
| | | | | | ACAGUAGC | |
| 53335_I2_49 | BCL11a | Intron 2 | + | chr2: 60494939-60494964 | CCUAACACAGUAGCUGG | 1280 |
| | | | | | UACCUGAU | |
| 53335_I2_50 | BCL11a | Intron 2 | + | chr2: 60494955-60494980 | GUACCUGAUAGGUGCCU | 1281 |
| | | | | | AUAUGUGA | |
| 53335_I2_51 | BCL11a | Intron 2 | + | chr2: 60494959-60494984 | CUGAUAGGUGCCUAUAU | 1282 |
| | | | | | GUGAUGGA | |
| 53335_I2_52 | BCL11a | Intron 2 | + | chr2: 60494960-60494985 | UGAUAGGUGCCUAUAUG | 1283 |
| | | | | | UGAUGGAU | |
| 53335_I2_53 | BCL11a | Intron 2 | + | chr2: 60494963-60494988 | UAGGUGCCUAUAUGUGA | 1284 |
| | | | | | UGGAUGGG | |
| 53335_I2_54 | BCL11a | Intron 2 | + | chr2: 60494986-60495011 | GGUGGACAGCCCGACAG | 1285 |
| | | | | | AUGAAAAA | |
| 53335_I2_55 | BCL11a | Intron 2 | + | chr2: 60494998-60495023 | GACAGAUGAAAAAUGGA | 1286 |
| | | | | | CAAUUAUG | |
| 53335_I2_56 | BCL11a | Intron 2 | + | chr2: 60495001-60495026 | AGAUGAAAAAUGGACAA | 1287 |
| | | | | | UUAUGAGG | |
| 53335_I2_57 | BCL11a | Intron 2 | + | chr2: 60495002-60495027 | GAUGAAAAAUGGACAAU | 1288 |
| | | | | | UAUGAGGA | |
| 53335_I2_58 | BCL11a | Intron 2 | + | chr2: 60495003-60495028 | AUGAAAAAUGGACAAUU | 1289 |
| | | | | | AUGAGGAG | |
| 53335_I2_59 | BCL11a | Intron 2 | + | chr2: 60495017-60495042 | AUUAUGAGGAGGGGAGA | 1290 |
| | | | | | GUGCAGAC | |
| 53335_I2_60 | BCL11a | Intron 2 | + | chr2: 60495018-60495043 | UUAUGAGGAGGGGAGAG | 1291 |
| | | | | | UGCAGACA | |
| 53335_I2_61 | BCL11a | Intron 2 | + | chr2: 60495019-60495044 | UAUGAGGAGGGGAGAGU | 1292 |
| | | | | | GCAGACAG | |
| 53335_I2_62 | BCL11a | Intron 2 | + | chr2: 60495045-60495070 | GGAAGCUUCACCUCCUU | 1293 |
| | | | | | UACAAUUU | |
| 53335_I2_63 | BCL11a | Intron 2 | + | chr2: 60495046-60495071 | GAAGCUUCACCUCCUUU | 1294 |
| | | | | | ACAAUUUU | |
| 53335_I2_64 | BCL11a | Intron 2 | + | chr2: 60495057-60495082 | UCCUUUACAAUUUUGGG | 1295 |
| | | | | | AGUCCACA | |
| 53335_I2_65 | BCL11a | Intron 2 | + | chr2: 60495062-60495087 | UACAAUUUUGGGAGUCC | 1296 |
| | | | | | ACACGGCA | |
| 53335_I2_66 | BCL11a | Intron 2 | + | chr2: 60495135-60495160 | CAUCACCAAGAGAGCCU | 1297 |
| | | | | | UCCGAAAG | |
| 53335_I2_67 | BCL11a | Intron 2 | + | chr2: 60495144-60495169 | GAGAGCCUUCCGAAAGA | 1298 |
| | | | | | GGCCCCCC | |
| 53335_I2_68 | BCL11a | Intron 2 | + | chr2: 60495145-60495170 | AGAGCCUUCCGAAAGAG | 1299 |
| | | | | | GCCCCCCU | |
| 53335_I2_69 | BCL11a | Intron 2 | + | chr2: 60495152-60495177 | UCCGAAAGAGGCCCCCC | 1300 |
| | | | | | UGGGCAAA | |
| 53335_I2_70 | BCL11a | Intron 2 | + | chr2: 60495162-60495187 | GCCCCCCUGGGCAAACG | 1301 |
| | | | | | GCCACCGA | |
| 53335_I2_71 | BCL11a | Intron 2 | + | chr2: 60495167-60495192 | CCUGGGCAAACGGCCAC | 1302 |
| | | | | | CGAUGGAG | |
| 53335_I2_72 | BCL11a | Intron 2 | + | chr2: 60495215-60495240 | CCACCCACGCCCCCACCC | 1303 |
| | | | | | UAAUCAG | |
| 53335_I2_73 | BCL11a | Intron 2 | + | chr2: 60495230-60495255 | CCCUAAUCAGAGGCCAA | 1304 |
| | | | | | ACCCUUCC | |
| 53335_I2_74 | BCL11a | Intron 2 | + | chr2: 60495293-60495318 | ACUAGCUUCAAAGUUGU | 1305 |
| | | | | | AUUGACCC | |
| 53335_I2_75 | BCL11a | Intron 2 | + | chr2: 60495333-60495358 | AAGAGUAGAUGCCAUAU | 1306 |
| | | | | | CUCUUUUC | |
| 53335_I2_76 | BCL11a | Intron 2 | + | chr2: 60495354-60495379 | UUUCUGGCCUAUGUUAU | 1307 |
| | | | | | UACCUGUA | |
| 53335_I2_77 | BCL11a | Intron 2 | + | chr2: 60495366-60495391 | GUUAUUACCUGUAUGGA | 1308 |
| | | | | | CUUUGCAC | |
| 53335_I2_78 | BCL11a | Intron 2 | + | chr2: 60495400-60495425 | CUAUCUGCUCUUACUUA | 1309 |
| | | | | | UGCACACC | |
| 53335_I2_79 | BCL11a | Intron 2 | + | chr2: 60495401-60495426 | UAUCUGCUCUUACUUAU | 1310 |
| | | | | | GCACACCU | |
| 53335_I2_80 | BCL11a | Intron 2 | + | chr2: 60495402-60495427 | AUCUGCUCUUACUUAUG | 1311 |
| | | | | | CACACCUG | |
| 53335_I2_81 | BCL11a | Intron 2 | + | chr2: 60495486-60495511 | CCUGUCUAGCUGCCUUC | 1312 |
| | | | | | CUUAUCAC | |
| 53335_I2_82 | BCL11a | Intron 2 | + | chr2: 60495500-60495525 | UUCCUUAUCACAGGAAU | 1313 |
| | | | | | AGCACCCA | |
| 53335_I2_83 | BCL11a | Intron 2 | + | chr2: 60495543-60495568 | GAGUAGAACCCCCUAUA | 1314 |
| | | | | | AACUAGUC | |
| 53335_I2_84 | BCL11a | Intron 2 | + | chr2: 60495554-60495579 | CCUAUAAACUAGUCUGG | 1315 |
| | | | | | UUUGCCCA | |
| 53335_I2_85 | BCL11a | Intron 2 | + | chr2: 60495555-60495580 | CUAUAAACUAGUCUGGU | 1316 |
| | | | | | UUGCCCAU | |
| 53335_I2_86 | BCL11a | Intron 2 | + | chr2: 60495556-60495581 | UAUAAACUAGUCUGGUU | 1317 |
| | | | | | UGCCCAUG | |
| 53335_I2_87 | BCL11a | Intron 2 | + | chr2: 60495566-60495591 | UCUGGUUUGCCCAUGGG | 1318 |
| | | | | | GCACAGUC | |
| 53335_I2_88 | BCL11a | Intron 2 | + | chr2: 60495578-60495603 | AUGGGGCACAGUCAGGC | 1319 |
| | | | | | UGUUUUCC | |
| 53335_I2_89 | BCL11a | Intron 2 | + | chr2: 60495579-60495604 | UGGGGCACAGUCAGGCU | 1320 |
| | | | | | GUUUUCCA | |
| 53335_I2_90 | BCL11a | Intron 2 | + | chr2: 60495582-60495607 | GGCACAGUCAGGCUGUU | 1321 |
| | | | | | UUCCAGGG | |
| 53335_I2_91 | BCL11a | Intron 2 | + | chr2: 60495583-60495608 | GCACAGUCAGGCUGUUU | 1322 |
| | | | | | UCCAGGGU | |
| 53335_I2_92 | BCL11a | Intron 2 | + | chr2: 60495584-60495609 | CACAGUCAGGCUGUUUU | 1323 |
| | | | | | CCAGGGUG | |
| 53335_I2_93 | BCL11a | Intron 2 | + | chr2: 60495661-60495686 | ACACACGUAUGUGUUGU | 1324 |
| | | | | | GAUCCCUG | |
| 53335_I2_94 | BCL11a | Intron 2 | + | chr2: 60495674-60495699 | UUGUGAUCCCUGUGGUU | 1325 |
| | | | | | UGAGAGUU | |
| 53335_I2_95 | BCL11a | Intron 2 | + | chr2: 60495706-60495731 | UCCCUAAAAGUCAAAAU | 1326 |
| | | | | | AUUCUCAA | |
| 53335_I2_96 | BCL11a | Intron 2 | + | chr2: 60495707-60495732 | CCCUAAAAGUCAAAAUA | 1327 |
| | | | | | UUCUCAAU | |
| 53335_I2_97 | BCL11a | Intron 2 | + | chr2: 60495735-60495760 | CCCUCAAUCAGCACAUA | 1328 |
| | | | | | CACACAAA | |
| 53335_I2_98 | BCL11a | Intron 2 | + | chr2: 60495742-60495767 | UCAGCACAUACACACAA | 1329 |
| | | | | | AAGGUACC | |
| 53335_I2_99 | BCL11a | Intron 2 | + | chr2: 60495775-60495800 | UGUAAUUCUUUUCCUGC | 1330 |
| | | | | | UCAAAGAC | |
| 53335_I2_100 | BCL11a | Intron 2 | + | chr2: 60495820-60495845 | CCCCAACCAAAAACCCUU | 1331 |
| | | | | | GCCACCA | |
| 53335_I2_101 | BCL11a | Intron 2 | + | chr2: 60495821-60495846 | CCCAACCAAAAACCCUU | 1332 |
| | | | | | GCCACCAU | |
| 53335_I2_102 | BCL11a | Intron 2 | + | chr2: 60495828-60495853 | AAAAACCCUUGCCACCA | 1333 |
| | | | | | UGGGAGCC | |
| 53335_I2_103 | BCL11a | Intron 2 | + | chr2: 60495829-60495854 | AAAACCCUUGCCACCAU | 1334 |
| | | | | | GGGAGCCU | |
| 53335_I2_104 | BCL11a | Intron 2 | + | chr2: 60495830-60495855 | AAACCCUUGCCACCAUG | 1335 |
| | | | | | GGAGCCUG | |
| 53335_I2_105 | BCL11a | Intron 2 | + | chr2: 60495839-60495864 | CCACCAUGGGAGCCUGG | 1336 |
| | | | | | GGCAGAGA | |
| 53335_I2_106 | BCL11a | Intron 2 | + | chr2: 60495867-60495892 | CACAGUGAAGUCAAACU | 1337 |
| | | | | | GUAAUUCC | |
| 53335_I2_107 | BCL11a | Intron 2 | + | chr2: 60495877-60495902 | UCAAACUGUAAUUCCAG | 1338 |
| | | | | | GCUCUAAA | |
| 53335_I2_108 | BCL11a | Intron 2 | + | chr2: 60495913-60495938 | UUUUUCUGAGAGUCUCU | 1339 |
| | | | | | AAAUUACA | |
| 53335_I2_109 | BCL11a | Intron 2 | + | chr2: 60495914-60495939 | UUUUCUGAGAGUCUCUA | 1340 |
| | | | | | AAUUACAA | |
| 53335_I2_110 | BCL11a | Intron 2 | + | chr2: 60495972-60495997 | ACACCUAAGAAACAUAC | 1341 |
| | | | | | UGCAGCUC | |
| 53335_I2_111 | BCL11a | Intron 2 | + | chr2: 60496001-60496026 | AAAGAGAACAAACAAAC | 1342 |
| | | | | | CAAAGAGA | |
| 53335_I2_112 | BCL11a | Intron 2 | + | chr2: 60496002-60496027 | AAGAGAACAAACAAACC | 1343 |
| | | | | | AAAGAGAA | |
| 53335_I2_113 | BCL11a | Intron 2 | + | chr2: 60496011-60496036 | AACAAACCAAAGAGAAG | 1344 |
| | | | | | GGAUCCAG | |
| 53335_I2_114 | BCL11a | Intron 2 | + | chr2: 60496048-60496073 | UAUGUGAAAAGUCAAUU | 1345 |
| | | | | | GAUAAUGA | |
| 53335_I2_115 | BCL11a | Intron 2 | + | chr2: 60496055-60496080 | AAAGUCAAUUGAUAAUG | 1346 |
| | | | | | AAGGCUUU | |
| 53335_I2_116 | BCL11a | Intron 2 | + | chr2: 60496063-60496088 | UUGAUAAUGAAGGCUUU | 1347 |
| | | | | | AGGAUAAC | |
| 53335_I2_117 | BCL11a | Intron 2 | + | chr2: 60496066-60496091 | AUAAUGAAGGCUUUAGG | 1348 |
| | | | | | AUAACCGG | |
| 53335_I2_118 | BCL11a | Intron 2 | + | chr2: 60496067-60496092 | UAAUGAAGGCUUUAGGA | 1349 |
| | | | | | UAACCGGA | |
| 53335_I2_119 | BCL11a | Intron 2 | + | chr2: 60496068-60496093 | AAUGAAGGCUUUAGGAU | 1350 |
| | | | | | AACCGGAG | |
| 53335_I2_120 | BCL11a | Intron 2 | + | chr2: 60496098-60496123 | AUGAUUGAAAGCAAUGC | 1351 |
| | | | | | ACCUGUGC | |
| 53335_I2_121 | BCL11a | Intron 2 | + | chr2: 60496104-60496129 | GAAAGCAAUGCACCUGU | 1352 |
| | | | | | GCAGGAAA | |
| 53335_I2_122 | BCL11a | Intron 2 | + | chr2: 60496111-60496136 | AUGCACCUGUGCAGGAA | 1353 |
| | | | | | AUGGAUUA | |
| 53335_I2_123 | BCL11a | Intron 2 | + | chr2: 60496118-60496143 | UGUGCAGGAAAUGGAUU | 1354 |
| | | | | | ACGGAAAC | |
| 53335_I2_124 | BCL11a | Intron 2 | + | chr2: 60496119-60496144 | GUGCAGGAAAUGGAUUA | 1355 |
| | | | | | CGGAAACA | |
| 53335_I2_125 | BCL11a | Intron 2 | + | chr2: 60496153-60496178 | UCAUGAAAUCCCAGAAA | 1356 |
| | | | | | ACCAGAAC | |
| 53335_I2_126 | BCL11a | Intron 2 | + | chr2: 60496154-60496179 | CAUGAAAUCCCAGAAAA | 1357 |
| | | | | | CCAGAACC | |
| 53335_I2_127 | BCL11a | Intron 2 | + | chr2: 60496164-60496189 | CAGAAAACCAGAACCGG | 1358 |
| | | | | | GAAAGUUC | |
| 53335_I2_128 | BCL11a | Intron 2 | + | chr2: 60496171-60496196 | CCAGAACCGGGAAAGUU | 1359 |
| | | | | | CUGGAAGU | |
| 53335_I2_129 | BCL11a | Intron 2 | + | chr2: 60496198-60496223 | GAAAAACAAAUCAUGAC | 1360 |
| | | | | | UUAAGCAA | |
| 53335_I2_130 | BCL11a | Intron 2 | + | chr2: 60496238-60496263 | CGUUUACAGAAUGCCUU | 1361 |
| | | | | | GUCCCACG | |
| 53335_I2_131 | BCL11a | Intron 2 | − | chr2: 60494308-60494333 | AGGCCAUGGUCACUGCC | 1362 |
| | | | | | CAGUUUAG | |
| 53335_I2_132 | BCL11a | Intron 2 | − | chr2: 60494327-60494352 | CCAGAGUGGGGAGGUGA | 1363 |
| | | | | | CCAGGCCA | |
| 53335_I2_133 | BCL11a | Intron 2 | − | chr2: 60494333-60494358 | CCAGGUCCAGAGUGGGG | 1364 |
| | | | | | AGGUGACC | |
| 53335_I2_134 | BCL11a | Intron 2 | − | chr2: 60494341-60494366 | GGGGCAACCCAGGUCCA | 1365 |
| | | | | | GAGUGGGG | |
| 53335_I2_135 | BCL11a | Intron 2 | − | chr2: 60494344-60494369 | AGAGGGGCAACCCAGGU | 1366 |
| | | | | | CCAGAGUG | |
| 53335_I2_136 | BCL11a | Intron 2 | − | chr2: 60494345-60494370 | CAGAGGGGCAACCCAGG | 1367 |
| | | | | | UCCAGAGU | |
| 53335_I2_137 | BCL11a | Intron 2 | − | chr2: 60494346-60494371 | ACAGAGGGGCAACCCAG | 1368 |
| | | | | | GUCCAGAG | |
| 53335_I2_138 | BCL11a | Intron 2 | − | chr2: 60494356-60494381 | CUCCUUGUUUACAGAGG | 1369 |
| | | | | | GGCAACCC | |
| 53335_I2_139 | BCL11a | Intron 2 | − | chr2: 60494365-60494390 | UAUUACAACCUCCUUGU | 1370 |
| | | | | | UUACAGAG | |
| 53335_I2_140 | BCL11a | Intron 2 | − | chr2: 60494366-60494391 | UUAUUACAACCUCCUUG | 1371 |
| | | | | | UUUACAGA | |
| 53335_I2_141 | BCL11a | Intron 2 | − | chr2: 60494367-60494392 | UUUAUUACAACCUCCUU | 1372 |
| | | | | | GUUUACAG | |
| 53335_I2_142 | BCL11a | Intron 2 | − | chr2: 60494401-60494426 | UAAGAUUUAUAAGACAU | 1373 |
| | | | | | UAGGGUAU | |
| 53335_I2_143 | BCL11a | Intron 2 | − | chr2: 60494407-60494432 | AUUGCAUAAGAUUUAUA | 1374 |
| | | | | | AGACAUUA | |
| 53335_I2_144 | BCL11a | Intron 2 | − | chr2: 60494408-60494433 | AAUUGCAUAAGAUUUAU | 1375 |
| | | | | | AAGACAUU | |
| 53335_I2_145 | BCL11a | Intron 2 | − | chr2: 60494440-60494465 | CUCUUCUCUCCCCAUACU | 1376 |
| | | | | | CCCAUCU | |
| 53335_I2_146 | BCL11a | Intron 2 | − | chr2: 60494477-60494502 | UUGAUAUCUCAUCUCAC | 1377 |
| | | | | | UGAGCUCU | |
| 53335_I2_147 | BCL11a | Intron 2 | − | chr2: 60494478-60494503 | UUUGAUAUCUCAUCUCA | 1378 |
| | | | | | CUGAGCUC | |
| 53335_I2_148 | BCL11a | Intron 2 | − | chr2: 60494526-60494551 | CUUUGCCAAUUGGAGAU | 1379 |
| | | | | | UAGGGAGA | |
| 53335_I2_149 | BCL11a | Intron 2 | − | chr2: 60494532-60494557 | GUCUGGCUUUGCCAAUU | 1380 |
| | | | | | GGAGAUUA | |
| 53335_I2_150 | BCL11a | Intron 2 | − | chr2: 60494533-60494558 | AGUCUGGCUUUGCCAAU | 1381 |
| | | | | | UGGAGAUU | |
| 53335_I2_151 | BCL11a | Intron 2 | − | chr2: 60494541-60494566 | UUGCCCCAAGUCUGGCU | 1382 |
| | | | | | UUGCCAAU | |
| 53335_I2_152 | BCL11a | Intron 2 | − | chr2: 60494554-60494579 | GAACCAGUCUGUAUUGC | 1383 |
| | | | | | CCCAAGUC | |
| 53335_I2_153 | BCL11a | Intron 2 | − | chr2: 60494599-60494624 | GGUGAUAAAUCAUUAGG | 1384 |
| | | | | | AAUGAGCU | |
| 53335_I2_154 | BCL11a | Intron 2 | − | chr2: 60494610-60494635 | AAAGAACAUUUGGUGAU | 1385 |
| | | | | | AAAUCAUU | |
| 53335_I2_155 | BCL11a | Intron 2 | − | chr2: 60494625-60494650 | AAAUUCCAGCUGAAGAA | 1386 |
| | | | | | AGAACAUU | |
| 53335_I2_156 | BCL11a | Intron 2 | − | chr2: 60494668-60494693 | AUAUACUAUUAUUAUUC | 1387 |
| | | | | | CUAUUUUA | |
| 53335_I2_157 | BCL11a | Intron 2 | − | chr2: 60494745-60494770 | AAGCUCGGAGCACUUAC | 1388 |
| | | | | | UCUGCUCU | |
| 53335_I2_158 | BCL11a | Intron 2 | − | chr2: 60494765-60494790 | GAGGCAGCAUUUUAGUU | 1389 |
| | | | | | CACAAGCU | |
| 53335_I2_159 | BCL11a | Intron 2 | − | chr2: 60494789-60494814 | UGAGGUGUAACUAAUAA | 1390 |
| | | | | | AUACCAGG | |
| 53335_I2_160 | BCL11a | Intron 2 | − | chr2: 60494792-60494817 | UGCUGAGGUGUAACUAA | 1391 |
| | | | | | UAAAUACC | |
| 53335_I2_161 | BCL11a | Intron 2 | − | chr2: 60494812-60494837 | GGGCCUGAUAACUUUGU | 1392 |
| | | | | | UUCUGCUG | |
| 53335_I2_162 | BCL11a | Intron 2 | − | chr2: 60494837-60494862 | UGACCCAAACUAGGAAU | 1393 |
| | | | | | UGGGGAAA | |
| 53335_I2_163 | BCL11a | Intron 2 | − | chr2: 60494838-60494863 | CUGACCCAAACUAGGAA | 1394 |
| | | | | | UUGGGGAA | |
| 53335_I2_164 | BCL11a | Intron 2 | − | chr2: 60494843-60494868 | UUCUUCUGACCCAAACU | 1395 |
| | | | | | AGGAAUUG | |
| 53335_I2_165 | BCL11a | Intron 2 | − | chr2: 60494844-60494869 | UUUCUUCUGACCCAAAC | 1396 |
| | | | | | UAGGAAUU | |
| 53335_I2_166 | BCL11a | Intron 2 | − | chr2: 60494845-60494870 | UUUUCUUCUGACCCAAA | 1397 |
| | | | | | CUAGGAAU | |
| 53335_I2_167 | BCL11a | Intron 2 | − | chr2: 60494851-60494876 | UUUCCCUUUUCUUCUGA | 1398 |
| | | | | | CCCAAACU | |
| 53335_I2_168 | BCL11a | Intron 2 | − | chr2: 60494942-60494967 | CCUAUCAGGUACCAGCU | 1399 |
| | | | | | ACUGUGUU | |
| 53335_I2_169 | BCL11a | Intron 2 | − | chr2: 60494961-60494986 | CAUCCAUCACAUAUAGG | 1400 |
| | | | | | CACCUAUC | |
| 53335_I2_170 | BCL11a | Intron 2 | − | chr2: 60494972-60494997 | GGCUGUCCACCCAUCCA | 1401 |
| | | | | | UCACAUAU | |
| 53335_I2_171 | BCL11a | Intron 2 | − | chr2: 60494998-60495023 | CAUAAUUGUCCAUUUUU | 1402 |
| | | | | | CAUCUGUC | |
| 53335_I2_172 | BCL11a | Intron 2 | − | chr2: 60494999-60495024 | UCAUAAUUGUCCAUUUU | 1403 |
| | | | | | UCAUCUGU | |
| 53335_I2_173 | BCL11a | Intron 2 | − | chr2: 60495058-60495083 | GUGUGGACUCCCAAAAU | 1404 |
| | | | | | UGUAAAGG | |
| 53335_I2_174 | BCL11a | Intron 2 | − | chr2: 60495061-60495086 | GCCGUGUGGACUCCCAA | 1405 |
| | | | | | AAUUGUAA | |
| 53335_I2_175 | BCL11a | Intron 2 | − | chr2: 60495080-60495105 | GAAAUAAUUUGUAUGCC | 1406 |
| | | | | | AUGCCGUG | |
| 53335_I2_176 | BCL11a | Intron 2 | − | chr2: 60495111-60495136 | GGAGAAUUGGAUUUUAU | 1407 |
| | | | | | UUCUCAAU | |
| 53335_I2_177 | BCL11a | Intron 2 | − | chr2: 60495112-60495137 | UGGAGAAUUGGAUUUUA | 1408 |
| | | | | | UUUCUCAA | |
| 53335_I2_178 | BCL11a | Intron 2 | − | chr2: 60495129-60495154 | GAAGGCUCUCUUGGUGA | 1409 |
| | | | | | UGGAGAAU | |
| 53335_I2_179 | BCL11a | Intron 2 | − | chr2: 60495137-60495162 | CUCUUUCGGAAGGCUCU | 1410 |
| | | | | | CUUGGUGA | |
| 53335_I2_180 | BCL11a | Intron 2 | − | chr2: 60495143-60495168 | GGGGGCCUCUUUCGGAA | 1411 |
| | | | | | GGCUCUCU | |
| 53335_I2_181 | BCL11a | Intron 2 | − | chr2: 60495152-60495177 | UUUGCCCAGGGGGGCCU | 1412 |
| | | | | | CUUUCGGA | |
| 53335_I2_182 | BCL11a | Intron 2 | − | chr2: 60495156-60495181 | GCCGUUUGCCCAGGGGG | 1413 |
| | | | | | GCCUCUUU | |
| 53335_I2_183 | BCL11a | Intron 2 | − | chr2: 60495166-60495191 | UCCAUCGGUGGCCGUUU | 1414 |
| | | | | | GCCCAGGG | |
| 53335_I2_184 | BCL11a | Intron 2 | − | chr2: 60495167-60495192 | CUCCAUCGGUGGCCGUU | 1415 |
| | | | | | UGCCCAGG | |
| 53335_I2_185 | BCL11a | Intron 2 | − | chr2: 60495168-60495193 | UCUCCAUCGGUGGCCGU | 1416 |
| | | | | | UUGCCCAG | |
| 53335_I2_186 | BCL11a | Intron 2 | − | chr2: 60495169-60495194 | CUCUCCAUCGGUGGCCG | 1417 |
| | | | | | UUUGCCCA | |
| 53335_I2_187 | BCL11a | Intron 2 | − | chr2: 60495170-60495195 | CCUCUCCAUCGGUGGCC | 1418 |
| | | | | | GUUUGCCC | |
| 53335_I2_188 | BCL11a | Intron 2 | − | chr2: 60495183-60495208 | GAGGACUGGCAGACCUC | 1419 |
| | | | | | UCCAUCGG | |
| 53335_I2_189 | BCL11a | Intron 2 | − | chr2: 60495186-60495211 | GAAGAGGACUGGCAGAC | 1420 |
| | | | | | CUCUCCAU | |
| 53335_I2_190 | BCL11a | Intron 2 | − | chr2: 60495202-60495227 | GGGCGUGGGUGGGGUAG | 1421 |
| | | | | | AAGAGGAC | |
| 53335_I2_191 | BCL11a | Intron 2 | − | chr2: 60495207-60495232 | GGUGGGGGCGUGGGUGG | 1422 |
| | | | | | GGUAGAAG | |
| 53335_I2_192 | BCL11a | Intron 2 | − | chr2: 60495216-60495241 | UCUGAUUAGGGUGGGGG | 1423 |
| | | | | | CGUGGGUG | |
| 53335_I2_193 | BCL11a | Intron 2 | − | chr2: 60495217-60495242 | CUCUGAUUAGGGUGGGG | 1424 |
| | | | | | GCGUGGGU | |
| 53335_I2_194 | BCL11a | Intron 2 | − | chr2: 60495218-60495243 | CCUCUGAUUAGGGUGGG | 1425 |
| | | | | | GGCGUGGG | |
| 53335_I2_195 | BCL11a | Intron 2 | − | chr2: 60495221-60495246 | UGGCCUCUGAUUAGGGU | 1426 |
| | | | | | GGGGGCGU | |
| 53335_I2_196 | BCL11a | Intron 2 | − | chr2: 60495222-60495247 | UUGGCCUCUGAUUAGGG | 1427 |
| | | | | | UGGGGGCG | |
| 53335_I2_197 | BCL11a | Intron 2 | − | chr2: 60495227-60495252 | AGGGUUUGGCCUCUGAU | 1428 |
| | | | | | UAGGGUGG | |
| 53335_I2_198 | BCL11a | Intron 2 | − | chr2: 60495228-60495253 | AAGGGUUUGGCCUCUGA | 1429 |
| | | | | | UUAGGGUG | |
| 53335_I2_199 | BCL11a | Intron 2 | − | chr2: 60495229-60495254 | GAAGGGUUUGGCCUCUG | 1430 |
| | | | | | AUUAGGGU | |
| 53335_I2_200 | BCL11a | Intron 2 | − | chr2: 60495230-60495255 | GGAAGGGUUUGGCCUCU | 1431 |
| | | | | | GAUUAGGG | |
| 53335_I2_201 | BCL11a | Intron 2 | − | chr2: 60495233-60495258 | CCAGGAAGGGUUUGGCC | 1432 |
| | | | | | UCUGAUUA | |
| 53335_I2_202 | BCL11a | Intron 2 | − | chr2: 60495234-60495259 | UCCAGGAAGGGUUUGGC | 1433 |
| | | | | | CUCUGAUU | |
| 53335_I2_203 | BCL11a | Intron 2 | − | chr2: 60495246-60495271 | UUUAUCACAGGCUCCAG | 1434 |
| | | | | | GAAGGGUU | |
| 53335_I2_204 | BCL11a | Intron 2 | − | chr2: 60495251-60495276 | UUGCUUUUAUCACAGGC | 1435 |
| | | | | | UCCAGGAA | |
| 53335_I2_205 | BCL11a | Intron 2 | − | chr2: 60495252-60495277 | GUUGCUUUUAUCACAGG | 1436 |
| | | | | | CUCCAGGA | |
| 53335_I2_206 | BCL11a | Intron 2 | − | chr2: 60495256-60495281 | AACAGUUGCUUUUAUCA | 1437 |
| | | | | | CAGGCUCC | |
| 53335_I2_207 | BCL11a | Intron 2 | − | chr2: 60495263-60495288 | GCAAGCUAACAGUUGCU | 1438 |
| | | | | | UUUAUCAC | |
| 53335_I2_208 | BCL11a | Intron 2 | − | chr2: 60495318-60495343 | AUCUACUCUUAGACAUA | 1439 |
| | | | | | ACACACCA | |
| 53335_I2_209 | BCL11a | Intron 2 | − | chr2: 60495319-60495344 | CAUCUACUCUUAGACAU | 1440 |
| | | | | | AACACACC | |
| 53335_I2_210 | BCL11a | Intron 2 | − | chr2: 60495347-60495372 | AAUAACAUAGGCCAGAA | 1441 |
| | | | | | AAGAGAUA | |
| 53335_I2_211 | BCL11a | Intron 2 | − | chr2: 60495364-60495389 | GCAAAGUCCAUACAGGU | 1442 |
| | | | | | AAUAACAU | |
| 53335_I2_212 | BCL11a | Intron 2 | − | chr2: 60495376-60495401 | GCUGAUUCCAGUGCAAA | 1443 |
| | | | | | GUCCAUAC | |
| 53335_I2_213 | BCL11a | Intron 2 | − | chr2: 60495426-60495451 | CGAUACAGGGCUGGCUC | 1444 |
| | | | | | UAUGCCCC | |
| 53335_I2_214 | BCL11a | Intron 2 | − | chr2: 60495440-60495465 | AGAUGGCUGAAAAGCGA | 1445 |
| | | | | | UACAGGGC | |
| 53335_I2_215 | BCL11a | Intron 2 | − | chr2: 60495444-60495469 | AGUGAGAUGGCUGAAAA | 1446 |
| | | | | | GCGAUACA | |
| 53335_I2_216 | BCL11a | Intron 2 | − | chr2: 60495445-60495470 | UAGUGAGAUGGCUGAAA | 1447 |
| | | | | | AGCGAUAC | |
| 53335_I2_217 | BCL11a | Intron 2 | − | chr2: 60495462-60495487 | GACUUGGGAGUUAUCUG | 1448 |
| | | | | | UAGUGAGA | |
| 53335_I2_218 | BCL11a | Intron 2 | − | chr2: 60495482-60495507 | UAAGGAAGGCAGCUAGA | 1449 |
| | | | | | CAGGACUU | |
| 53335_I2_219 | BCL11a | Intron 2 | − | chr2: 60495483-60495508 | AUAAGGAAGGCAGCUAG | 1450 |
| | | | | | ACAGGACU | |
| 53335_I2_220 | BCL11a | Intron 2 | − | chr2: 60495489-60495514 | CCUGUGAUAAGGAAGGC | 1451 |
| | | | | | AGCUAGAC | |
| 53335_I2_221 | BCL11a | Intron 2 | − | chr2: 60495501-60495526 | UUGGGUGCUAUUCCUGU | 1452 |
| | | | | | GAUAAGGA | |
| 53335_I2_222 | BCL11a | Intron 2 | − | chr2: 60495505-60495530 | GACCUUGGGUGCUAUUC | 1453 |
| | | | | | CUGUGAUA | |
| 53335_I2_223 | BCL11a | Intron 2 | − | chr2: 60495524-60495549 | CUACUCUGAGGUACUGA | 1454 |
| | | | | | UGGACCUU | |
| 53335_I2_224 | BCL11a | Intron 2 | − | chr2: 60495525-60495550 | UCUACUCUGAGGUACUG | 1455 |
| | | | | | AUGGACCU | |
| 53335_I2_225 | BCL11a | Intron 2 | − | chr2: 60495532-60495557 | AGGGGGUUCUACUCUGA | 1456 |
| | | | | | GGUACUGA | |
| 53335_I2_226 | BCL11a | Intron 2 | − | chr2: 60495541-60495566 | CUAGUUUAUAGGGGGUU | 1457 |
| | | | | | CUACUCUG | |
| 53335_I2_227 | BCL11a | Intron 2 | − | chr2: 60495554-60495579 | UGGGCAAACCAGACUAG | 1458 |
| | | | | | UUUAUAGG | |
| 53335_I2_228 | BCL11a | Intron 2 | − | chr2: 60495555-60495580 | AUGGGCAAACCAGACUA | 1459 |
| | | | | | GUUUAUAG | |
| 53335_I2_229 | BCL11a | Intron 2 | − | chr2: 60495556-60495581 | CAUGGGCAAACCAGACU | 1460 |
| | | | | | AGUUUAUA | |
| 53335_I2_230 | BCL11a | Intron 2 | − | chr2: 60495557-60495582 | CCAUGGGCAAACCAGAC | 1461 |
| | | | | | UAGUUUAU | |
| 53335_I2_231 | BCL11a | Intron 2 | − | chr2: 60495578-60495603 | GGAAAACAGCCUGACUG | 1462 |
| | | | | | UGCCCCAU | |
| 53335_I2_232 | BCL11a | Intron 2 | − | chr2: 60495579-60495604 | UGGAAAACAGCCUGACU | 1463 |
| | | | | | GUGCCCCA | |
| 53335_I2_233 | BCL11a | Intron 2 | − | chr2: 60495604-60495629 | GGCAGAGAAUGUCUGCA | 1464 |
| | | | | | CCCCACCC | |
| 53335_I2_234 | BCL11a | Intron 2 | − | chr2: 60495630-60495655 | UGACGUUAUAUGUAAGC | 1465 |
| | | | | | AUCACAAC | |
| 53335_I2_235 | BCL11a | Intron 2 | − | chr2: 60495684-60495709 | GGAAGCUCCAAACUCUC | 1466 |
| | | | | | AAACCACA | |
| 53335_I2_236 | BCL11a | Intron 2 | − | chr2: 60495685-60495710 | GGGAAGCUCCAAACUCU | 1467 |
| | | | | | CAAACCAC | |
| 53335_I2_237 | BCL11a | Intron 2 | − | chr2: 60495710-60495735 | CCCAUUGAGAAUAUUUU | 1468 |
| | | | | | GACUUUUA | |
| 53335_I2_238 | BCL11a | Intron 2 | − | chr2: 60495711-60495736 | GCCCAUUGAGAAUAUUU | 1469 |
| | | | | | UGACUUUU | |
| 53335_I2_239 | BCL11a | Intron 2 | − | chr2: 60495738-60495763 | CCUUUUGUGUGUAUGUG | 1470 |
| | | | | | CUGAUUGA | |
| 53335_I2_240 | BCL11a | Intron 2 | − | chr2: 60495739-60495764 | ACCUUUUGUGUGUAUGU | 1471 |
| | | | | | GCUGAUUG | |
| 53335_I2_241 | BCL11a | Intron 2 | − | chr2: 60495768-60495793 | AGCAGGAAAAGAAUUAC | 1472 |
| | | | | | AGUUUUCC | |
| 53335_I2_242 | BCL11a | Intron 2 | − | chr2: 60495790-60495815 | GGUAUUGAAUUGCCUGU | 1473 |
| | | | | | CUUUGAGC | |
| 53335_I2_243 | BCL11a | Intron 2 | − | chr2: 60495816-60495841 | GGCAAGGGUUUUUGGUU | 1474 |
| | | | | | GGGGGAAG | |
| 53335_I2_244 | BCL11a | Intron 2 | − | chr2: 60495817-60495842 | UGGCAAGGGUUUUUGGU | 1475 |
| | | | | | UGGGGGAA | |
| 53335_I2_245 | BCL11a | Intron 2 | − | chr2: 60495818-60495843 | GUGGCAAGGGUUUUUGG | 1476 |
| | | | | | UUGGGGGA | |
| 53335_I2_246 | BCL11a | Intron 2 | − | chr2: 60495822-60495847 | CAUGGUGGCAAGGGUUU | 1477 |
| | | | | | UUGGUUGG | |
| 53335_I2_247 | BCL11a | Intron 2 | − | chr2: 60495823-60495848 | CCAUGGUGGCAAGGGUU | 1478 |
| | | | | | UUUGGUUG | |
| 53335_I2_248 | BCL11a | Intron 2 | − | chr2: 60495824-60495849 | CCCAUGGUGGCAAGGGU | 1479 |
| | | | | | UUUUGGUU | |
| 53335_I2_249 | BCL11a | Intron 2 | − | chr2: 60495825-60495850 | UCCCAUGGUGGCAAGGG | 1480 |
| | | | | | UUUUUGGU | |
| 53335_I2_250 | BCL11a | Intron 2 | − | chr2: 60495829-60495854 | AGGCUCCCAUGGUGGCA | 1481 |
| | | | | | AGGGUUUU | |
| 53335_I2_251 | BCL11a | Intron 2 | − | chr2: 60495836-60495861 | CUGCCCCAGGCUCCCAUG | 1482 |
| | | | | | GUGGCAA | |
| 53335_I2_252 | BCL11a | Intron 2 | − | chr2: 60495837-60495862 | UCUGCCCCAGGCUCCCAU | 1483 |
| | | | | | GGUGGCA | |
| 53335_I2_253 | BCL11a | Intron 2 | − | chr2: 60495842-60495867 | CCUUCUCUGCCCCAGGCU | 1484 |
| | | | | | CCCAUGG | |
| 53335_I2_254 | BCL11a | Intron 2 | − | chr2: 60495845-60495870 | GUGCCUUCUCUGCCCCA | 1485 |
| | | | | | GGCUCCCA | |
| 53335_I2_255 | BCL11a | Intron 2 | − | chr2: 60495854-60495879 | GACUUCACUGUGCCUUC | 1486 |
| | | | | | UCUGCCCC | |
| 53335_I2_256 | BCL11a | Intron 2 | − | chr2: 60495893-60495918 | AAAAAUGACAGCACCAU | 1487 |
| | | | | | UUAGAGCC | |
| 53335_I2_257 | BCL11a | Intron 2 | − | chr2: 60495978-60496003 | UUUCCAGAGCUGCAGUA | 1488 |
| | | | | | UGUUUCUU | |
| 53335_I2_258 | BCL11a | Intron 2 | − | chr2: 60496020-60496045 | GGGUGACCUCUGGAUCC | 1489 |
| | | | | | CUUCUCUU | |
| 53335_I2_259 | BCL11a | Intron 2 | − | chr2: 60496035-60496060 | ACUUUUCACAUAUGAGG | 1490 |
| | | | | | GUGACCUC | |
| 53335_I2_260 | BCL11a | Intron 2 | − | chr2: 60496045-60496070 | UUAUCAAUUGACUUUUC | 1491 |
| | | | | | ACAUAUGA | |
| 53335_I2_261 | BCL11a | Intron 2 | − | chr2: 60496046-60496071 | AUUAUCAAUUGACUUUU | 1492 |
| | | | | | CACAUAUG | |
| 53335_I2_262 | BCL11a | Intron 2 | − | chr2: 60496090-60496115 | GCAUUGCUUUCAAUCAU | 1493 |
| | | | | | CUCCCCUC | |
| 53335_I2_263 | BCL11a | Intron 2 | − | chr2: 60496119-60496144 | UGUUUCCGUAAUCCAUU | 1494 |
| | | | | | UCCUGCAC | |
| 53335_I2_264 | BCL11a | Intron 2 | − | chr2: 60496165-60496190 | AGAACUUUCCCGGUUCU | 1495 |
| | | | | | GGUUUUCU | |
| 53335_I2_265 | BCL11a | Intron 2 | − | chr2: 60496166-60496191 | CAGAACUUUCCCGGUUC | 1496 |
| | | | | | UGGUUUUC | |
| 53335_I2_266 | BCL11a | Intron 2 | − | chr2: 60496174-60496199 | CCGACUUCCAGAACUUU | 1497 |
| | | | | | CCCGGUUC | |
| 53335_I2_267 | BCL11a | Intron 2 | − | chr2: 60496180-60496205 | GUUUUUCCGACUUCCAG | 1498 |
| | | | | | AACUUUCC | |
| 53335_I2_268 | BCL11a | Intron 2 | − | chr2: 60496233-60496258 | GACAAGGCAUUCUGUAA | 1499 |
| | | | | | ACGUGUAU | |

[0352] In embodiments, the gRNA targeting domain consists of the 20 3′ nt of any one of the sequences in the table above.

[0353] Exemplary preferred gRNA targeting domains useful in the compositions and methods of the invention are described in the tables below.

TABLE 5
Preferred Guide RNA Targeting Domains Directed
to Coding Regions of the BCL11a Gene

| | | | | SEQ ID |
|---|---|---|---|---|
| Id. | Target | gRNA Targeting Domain | Targeting Site (Chr2) | NO: |
| CR000044 | BCL11a | ACAGGCCGUGAACCUAAGUG | 60678414-60678436 | 1 |
| CR000056 | BCL11a | UAGAGGGGGGAAAUUAUAGG | 60678685-60678707 | 2 |
| CR000068 | BCL11a | CGAGCGGUAAAUCCUAAAGA | 60678840-60678862 | 3 |
| CR000079 | BCL11a | AGACAAAUUCAAAUCCUGCA | 60678895-60678917 | 4 |
| CR000091 | BCL11a | GCUUUUGGUGGCUACCAUGC | 60678909-60678931 | 5 |
| CR000102 | BCL11a | AAUUUAUGCCAUCUGAUAAG | 60679112-60679134 | 6 |
| CR000033 | BCL11a | UGUUCCUCCUACCCACCCGA | 60679178-60679200 | 7 |
| CR000045 | BCL11a | AUAAAUGUUGGAGCUUUAGG | 60679288-60679310 | 8 |
| CR000069 | BCL11a | CAACCUAAUUACCUGUAUUG | 60679389-60679411 | 9 |
| CR000080 | BCL11a | CGCUGUCAUGAGUGAUGCCC | 60679428-60679450 | 10 |
| CR000092 | BCL11a | GGCAUCACUCAUGACAGCGA | 60679432-60679454 | 11 |
| CR000103 | BCL11a | AGUCCCAUAGAGAGGGCCCG | 60679456-60679478 | 12 |
| CR000115 | BCL11a | ACUGAUUCACUGUUCCAAUG | 60679476-60679498 | 13 |
| CR000034 | BCL11a | AGGACUCUGUCUUCGCACAA | 60679577-60679599 | 14 |
| CR000058 | BCL11a | CCACGCUGACGUCGACUGGG | 60679650-60679672 | 15 |
| CR000070 | BCL11a | GUUCUUCACACACCCCCAUU | 60679779-60679801 | 16 |
| CR000081 | BCL11a | GCGCUUCUCCACACCGCCCG | 60687934-60687956 | 17 |
| CR000093 | BCL11a | GUCUGGAGUCUCCGAAGCUA | 60688006-60688028 | 18 |
| CR000116 | BCL11a | AAAGAUCCCUUCCUUAGCUU | 60688017-60688039 | 19 |
| CR000035 | BCL11a | UCGCCGGCUACGCGGCCUCC | 60688046-60688068 | 20 |
| CR000047 | BCL11a | CGGAGAACGUGUACUCGCAG | 60688070-60688092 | 21 |
| CR000071 | BCL11a | GAGCUUGAUGCGCUUAGAGA | 60688133-60688155 | 22 |
| CR000082 | BCL11a | CCCCCCGAGGCCGACUCGCC | 60688200-60688222 | 23 |
| CR000094 | BCL11a | CACCAUGCCCUGCAUGACGU | 60688394-60688416 | 24 |
| CR000105 | BCL11a | GAGAGCGAGAGGGUGGACUA | 60688506-60688528 | 25 |
| CR000117 | BCL11a | CACGGACUUGAGCGCGCUGC | 60688649-60688671 | 26 |
| CR000036 | BCL11a | GCCCACCAAGUCGCUGGUGC | 60688676-60688698 | 27 |
| CR000048 | BCL11a | CCCACCAAGUCGCUGGUGCC | 60688677-60688699 | 28 |
| CR000060 | BCL11a | GGCGGUGGAGAGACCGUCGU | 60688712-60688734 | 29 |
| CR000072 | BCL11a | GCCGCAGAACUCGCAUGACU | 60688898-60688920 | 30 |
| CR000083 | BCL11a | CCGCCCCCAGGCGCUCUAUG | 60689194-60689216 | 31 |
| CR000095 | BCL11a | UGGGGGUCCAAGUGAUGUCU | 60689217-60689239 | 32 |
| CR000106 | BCL11a | CUCAACUUACAAAUACCCUG | 60695857-60695879 | 33 |
| CR000118 | BCL11a | AGUGCAGAAUAUGCCCCGCA | 60695872-60695894 | 34 |
| CR000037 | BCL11a | GCAUAUUCUGCACUCAUCCC | 60695881-60695903 | 35 |
| CR000049 | BCL11a | GAGCUCUAAUCCCCACGCCU | 60695898-60695920 | 36 |
| CR000061 | BCL11a | AGAGCUCCAUGUGCAGAACG | 60695914-60695936 | 37 |
| CR000084 | BCL11a | GAUAAACUUCUGCACUGGAG | 60695947-60695969 | 38 |
| CR000096 | BCL11a | UAGCUGUAGUGCUUGAUUUU | 60695981-60696003 | 39 |
| CR000107 | BCL11a | UAUCCAAAUUCAUACAAUAG | 60716451-60716473 | 40 |
| CR000119 | BCL11a | AUGCCCUGAGUAUCCCAACA | 60717068-60717090 | 41 |
| CR000038 | BCL11a | UAGUAACAGACCCAUGUGCU | 60717232-60717254 | 42 |
| CR000050 | BCL11a | AUACUUCAAGGCCUCAAUGA | 60717661-60717683 | 43 |
| CR000062 | BCL11a | GACUAGGUAGACCUUCAUUG | 60717672-60717694 | 44 |
| CR000073 | BCL11a | CUGAGCUAGUGGGGGCUCUU | 60720773-60720795 | 45 |
| CR000085 | BCL11a | CUGAGCACAUUCUUACGCCU | 60721291-60721313 | 46 |
| CR000097 | BCL11a | UUUAUAAGACAUUAGGGUAt | 60721534-60721556 | 47 |
| CR000108 | BCL11a | UGAUAGGUGCCUAUAUGUGA | 60722096-60722118 | 48 |
| CR000120 | BCL11a | UCCACCCAUCCAUCACAUAU | 60722105-60722127 | 49 |
| CR000039 | BCL11a | CUUCAAAGUUGUAUUGACCC | 60722434-60722456 | 50 |
| CR000051 | BCL11a | AAACCAGACUAGUUUAUAGG | 60722687-60722709 | 51 |
| CR000063 | BCL11a | UUUGAGACAGUUACCCCUUC | 60723706-60723728 | 52 |
| CR000074 | BCL11a | AACCUGAGGGCUAGUUUCUA | 60724541-60724563 | 53 |
| CR000086 | BCL11a | GCCUGGACCCACCGCUUCAU | 60725058-60725080 | 54 |
| CR000109 | BCL11a | AAACCAGUGAGGUCAUCUAU | 60725857-60725879 | 55 |
| CR000121 | BCL11a | ACCUGCUAUGUGUUCCUGUU | 60773104-60773126 | 56 |
| CR000040 | BCL11a | UAGAGGAAUUUGCCCCAAAC | 60773118-60773140 | 57 |
| CR000052 | BCL11a | GAUAAACAAUCGUCAUCCUC | 60773150-60773172 | 58 |
| CR000064 | BCL11a | UGGCAUCCAGGUCACGCCAG | 60773166-60773188 | 59 |
| CR000075 | BCL11a | GACCUGGAUGCCAACCUCCA | 60773176-60773198 | 60 |
| CR000087 | BCL11a | AAAAGCAUCCAAUCCCGUGG | 60773190-60773212 | 61 |
| CR000110 | BCL11a | GAUGCUUUUUUCAUCUCGAU | 60773204-60773226 | 62 |
| CR000122 | BCL11a | CCACAGCUUUUUCUAAGCAG | 60773247-60773269 | 63 |
| CR000041 | BCL11a | CCCCCAAUGGGAAGUUCAUC | 60773316-60773338 | 64 |
| CR000053 | BCL11a | AUCAUGACCUCCUCACCUGU | 60773344-60773366 | 65 |
| CR000065 | BCL11a | AGGAGGUCAUGAUCCCCUUC | 60773354-60773376 | 66 |
| CR000088 | BCL11a | CCCCUUCUGGAGCUCCCAAC | 60773367-60773389 | 67 |
| CR000099 | BCL11a | GCUCCCAACGGGCCGUGGUC | 60773378-60773400 | 68 |
| CR000111 | BCL11a | ACAGAUGAUGAACCAGACCA | 60773390-60773412 | 69 |
| CR000123 | BCL11a | UCUGUAAGAAUGGCUUCAAG | 60773408-60773430 | 70 |
| CR000042 | BCL11a | CAAUUAUUAGAGUGCCAGAG | 60773459-60773481 | 71 |
| CR000054 | BCL11a | GCCUUGCUUGCGGCGAGACA | 60780385-60780407 | 72 |
| CR000066 | BCL11a | ACCAUGUCUCGCCGCAAGCA | 60780386-60780408 | 73 |
| CR000077 | BCL11a | GAGUCUCCUUCUUUCUAACC | 60780482-60780504 | 74 |
| CR000089 | BCL11a | GAAUUGUGGGAGAGCCGUCA | 60780582-60780604 | 75 |
| CR000100 | BCL11a | AAAAUAGAGCGAGAGUGCAC | 60781166-60781188 | 76 |
| CR000112 | BCL11a | GCCCCUGGCGUCCACACGCG | 60781306-60781328 | 77 |
| CR000124 | BCL11a | CUCCUCGUUCUUUAUUCCUC | 60781716-60781738 | 78 |
| CR000043 | BCL11a | GACUGCCCGCGCUUUGUCCU | 60781815-60781837 | 79 |
| CR000055 | BCL11a | UUCCCAGGGACUGGGACUCC | 60781838-60781860 | 80 |
| CR000078 | BCL11a | UGGCUCCUGGGUGUGCGCCU | 60782123-60782145 | 81 |
| CR000090 | BCL11a | UGAAGCCCGCUUUUUGACAG | 60782254-60782276 | 82 |
| CR000101 | BCL11a | AGGGUGGAGACGGGUCGCCA | 60782526-60782548 | 83 |
| CR000113 | BCL11a | GCUCAGGGUCUCGCGGGCCA | 60782543-60782565 | 84 |
| CR000059 | BCL11a | UGAGUCCGAGCAGAAGAAGA | 73160981-73161003 | 85 |

TABLE 6
Preferred Guide RNA Targeting Domains directed to the French HPFH
(French HPFH; Sankaran VG et al. A functional element necessary
for fetal hemoglobin silencing. NEJM (2011) 365: 807-814.)

| | | | | | SEQ |
|---|---|---|---|---|---|
| | Target | | | Genomic Target | ID |
| Id. | Name | Strand | gRNA Targeting Domain | Location | NO: |
| CR001016 | HPFH | − | UCUUAAACCAACCUGCUCAC | chr11: 5234538-5234558 | 86 |
| CR001017 | HPFH | + | CAGGUUGGUUUAAGAUAAGC | chr11: 5234543-5234563 | 87 |
| CR001018 | HPFH | + | AGGUUGGUUUAAGAUAAGCA | chr11: 5234544-5234564 | 88 |
| CR001019 | HPFH | − | UUAAGGGAAUAGUGGAAUGA | chr11: 5234600-5234620 | 89 |
| CR001020 | HPFH | − | AGGGCAAGUUAAGGGAAUAG | chr11: 5234608-5234628 | 90 |
| CR001021 | HPFH | + | CCCUUAACUUGCCCUGAGAU | chr11: 5234613-5234633 | 91 |
| CR001022 | HPFH | − | CCAAUCUCAGGGCAAGUUAA | chr11: 5234616-5234636 | 92 |
| CR001023 | HPFH | − | GCCAAUCUCAGGGCAAGUUA | chr11: 5234617-5234637 | 93 |
| CR001024 | HPFH | − | UGACAGAACAGCCAAUCUCA | chr11: 5234627-5234647 | 94 |
| CR001025 | HPFH | − | AUGACAGAACAGCCAAUCUC | chr11: 5234628-5234648 | 95 |
| CR001026 | HPFH | − | GAGAUAUGUAGAGGAGAACA | chr11: 5234670-5234690 | 96 |
| CR001027 | HPFH | − | GGAGAUAUGUAGAGGAGAAC | chr11: 5234671-5234691 | 97 |
| CR001028 | HPFH | − | UGCGGUGGGGAGAUAUGUAG | chr11: 5234679-5234699 | 98 |
| CR001029 | HPFH | − | CUGCUGAAAGAGAUGCGGUG | chr11: 5234692-5234712 | 99 |
| CR001030 | HPFH | − | ACUGCUGAAAGAGAUGCGGU | chr11: 5234693-5234713 | 100 |
| CR001031 | HPFH | − | AACUGCUGAAAGAGAUGCGG | chr11: 5234694-5234714 | 101 |
| CR001032 | HPFH | − | AACAACUGCUGAAAGAGAUG | chr11: 5234697-5234717 | 102 |
| CR001033 | HPFH | − | UCUGCAAAAAUGAAACUAGG | chr11: 5234731-5234751 | 103 |
| CR001034 | HPFH | − | ACUUCUGCAAAAAUGAAACU | chr11: 5234734-5234754 | 104 |
| CR001035 | HPFH | + | CAUUUUUGCAGAAGUGUUUU | chr11: 5234739-5234759 | 105 |
| CR001036 | HPFH | + | AGUGUUUUAGGCUAAUAUAG | chr11: 5234751-5234771 | 106 |
| CR001037 | HPFH | − | UUGGAGACAAAAAUCUCUAG | chr11: 5234883-5234903 | 107 |
| CR001038 | HPFH | + | UCUAGAGAUUUUUGUCUCCA | chr11: 5234882-5234902 | 108 |
| CR001039 | HPFH | + | CUAGAGAUUUUUGUCUCCAA | chr11: 5234883-5234903 | 109 |
| CR001040 | HPFH | + | GUCUCCAAGGGAAUUUUGAG | chr11: 5234895-5234915 | 110 |
| CR001041 | HPFH | + | CCAAGGGAAUUUUGAGAGGU | chr11: 5234899-5234919 | 111 |
| CR001042 | HPFH | − | CCAACCUCUCAAAAUUCCCU | chr11: 5234902-5234922 | 112 |
| CR001043 | HPFH | + | GGAAUUUUGAGAGGUUGGAA | chr11: 5234904-5234924 | 113 |
| CR001044 | HPFH | + | UGCUUGCUUCCUCCUUCUUU | chr11: 5234953-5234973 | 114 |
| CR001045 | HPFH | − | AAGAAUUUACCAAAAGAAGG | chr11: 5234965-5234985 | 115 |
| CR001046 | HPFH | − | AGGAAGAAUUUACCAAAAGA | chr11: 5234968-5234988 | 116 |
| CR001047 | HPFH | − | AAAAAUUAGAGUUUUAUUAU | chr11: 5234988-5235008 | 117 |
| CR001048 | HPFH | − | UUUUUUAAAUAUUCUUUUAA | Chr11: 5235023-5235045 | 118 |
| CR001049 | HPFH | + | UAUUUACCAGUUAUUGAAAU | chr11: 5235062-5235082 | 119 |
| CR001050 | HPFH | + | CCAGUUAUUGAAAUAGGUUC | chr11: 5235068-5235088 | 120 |
| CR001051 | HPFH | − | CCAGAACCUAUUUCAAUAAC | chr11: 5235071-5235091 | 121 |
| CR001052 | HPFH | + | UUCUGGAAACAUGAAUUUUA | chr11: 5235085-5235105 | 122 |
| CR001053 | HPFH | + | AUUUUGAAUGUUUAAAAUUA | chr11: 5235151-5235171 | 123 |
| CR001054 | HPFH | − | AAAUUUAAUCUGGCUGAAUA | chr11: 5235216-5235236 | 124 |
| CR001055 | HPFH | − | GAACUUCGUUAAAUUUAAUC | chr11: 5235226-5235246 | 125 |
| CR001056 | HPFH | + | AUUAAAUUUAACGAAGUUCC | chr11: 5235227-5235247 | 126 |
| CR001057 | HPFH | + | UUAAAUUUAACGAAGUUCCU | chr11: 5235228-5235248 | 127 |
| CR001058 | HPFH | − | UUCUGUACUAGCAUAUUCCC | chr11: 5235248-5235268 | 128 |
| CR001059 | HPFH | + | UGUGUUCUUAAAAAAAAAUG | Chr11: 5235275-5235297 | 129 |
| CR001060 | HPFH | + | AAAAAUGUGGAAUUAGACCC | chr11: 5235293-5235313 | 130 |
| CR001061 | HPFH | − | CUACUGGGAUCUUCAUUCCU | chr11: 5235313-5235333 | 131 |
| CR001062 | HPFH | − | ACUACUGGGAUCUUCAUUCC | chr11: 5235314-5235334 | 132 |
| CR001063 | HPFH | − | GAAAAGAGUGAAAAACUACU | chr11: 5235328-5235348 | 133 |
| CR001064 | HPFH | − | AGAAAAGAGUGAAAAACUAC | chr11: 5235329-5235349 | 134 |
| CR001065 | HPFH | + | GAAUUCAAAUAAUGCCACAA | chr11: 5235349-5235369 | 135 |
| CR001066 | HPFH | − | UGUGUAUUUGUCUGCCAUUG | chr11: 5235366-5235386 | 136 |
| CR001067 | HPFH | + | CACCCAUGAGCAUAUCCAAA | chr11: 5235384-5235404 | 137 |
| CR001068 | HPFH | − | UUCCUUUUGGAUAUGCUCAU | chr11: 5235389-5235409 | 138 |
| CR001069 | HPFH | − | CUUCCUUUUGGAUAUGCUCA | chr11: 5235390-5235410 | 139 |
| CR001070 | HPFH | + | CAUGAGCAUAUCCAAAAGGA | chr11: 5235388-5235408 | 140 |
| CR001071 | HPFH | + | UAUCCAAAAGGAAGGAUUGA | chr11: 5235396-5235416 | 141 |
| CR001072 | HPFH | − | UUUCCUUCAAUCCUUCCUUU | chr11: 5235402-5235422 | 142 |
| CR001073 | HPFH | + | AAGGAAGGAUUGAAGGAAAG | chr11: 5235403-5235423 | 143 |
| CR001074 | HPFH | + | GAAGGAUUGAAGGAAAGAGG | chr11: 5235406-5235426 | 144 |
| CR001075 | HPFH | + | GAGGAGGAAGAAAUGGAGAA | chr11: 5235422-5235442 | 145 |
| CR001076 | HPFH | + | AGGAAGAAAUGGAGAAAGGA | chr11: 5235426-5235446 | 146 |
| CR001077 | HPFH | + | GAAGGAAGAGGGGAAGAGAG | chr11: 5235448-5235468 | 147 |
| CR001078 | HPFH | + | GAAGAGGGGAAGAGAGAGGA | chr11: 5235452-5235472 | 148 |
| CR001079 | HPFH | + | AGGGGAAGAGAGAGGAUGGA | chr11: 5235456-5235476 | 149 |
| CR001080 | HPFH | + | GGGGAAGAGAGAGGAUGGAA | chr11: 5235457-5235477 | 150 |
| CR001081 | HPFH | + | AAGAGAGAGGAUGGAAGGGA | chr11: 5235461-5235481 | 151 |
| CR001082 | HPFH | + | AGAGAGGAUGGAAGGGAUGG | chr11: 5235464-5235484 | 152 |
| CR001083 | HPFH | + | GGAAGGGAUGGAGGAGAAGA | chr11: 5235473-5235493 | 153 |
| CR001084 | HPFH | + | GAAGAAGGAAAAAUAAAUAA | Chr11: 5235483-5235505 | 154 |
| CR001085 | HPFH | + | AGGAAAAAUAAAUAAUGGAG | Chr11: 5235488-5235510 | 155 |
| CR001086 | HPFH | + | AAAUAAAUAAUGGAGAGGAG | chr11: 5235498-5235518 | 156 |
| CR001087 | HPFH | + | UGGAGAGGAGAGGAGAAAAA | chr11: 5235508-5235528 | 157 |
| CR001088 | HPFH | + | AGAGGAGAGGAGAAAAAAGG | chr11: 5235511-5235531 | 158 |
| CR001089 | HPFH | + | GAGGAGAGGAGAAAAAAGGA | chr11: 5235512-5235532 | 159 |
| CR001090 | HPFH | + | AGGAGAGGAGAAAAAAGGAG | chr11: 5235513-5235533 | 160 |
| CR001091 | HPFH | + | AGGAGAAAAAAGGAGGGGAG | chr11: 5235518-5235538 | 161 |
| CR001092 | HPFH | + | GAGAGGAGAGGAGAAGGGAU | chr11: 5235535-5235555 | 162 |
| CR001093 | HPFH | + | AGAGGAGAGGAGAAGGGAUA | chr11: 5235536-5235556 | 163 |
| CR001094 | HPFH | + | GAAGAGAAAGAGAAAGGGAA | Chr11: 5235553-5235575 | 164 |
| CR001095 | HPFH | + | AAGAGAGGAAAGAAGAGAAG | chr11: 5235581-5235601 | 165 |
| CR001096 | HPFH | + | GAGAGAAAAGAAACGAAGAG | Chr11: 5235598-5235620 | 166 |
| CR001097 | HPFH | + | AGAGAAAAGAAACGAAGAGA | Chr11: 5235599-5235621 | 167 |
| CR001098 | HPFH | + | GAGAAAAGAAACGAAGAGAG | Chr11: 5235600-5235622 | 168 |
| CR001099 | HPFH | + | AAAGAAACGAAGAGAGGGGA | chr11: 5235609-5235629 | 169 |
| CR001100 | HPFH | + | AAGAAACGAAGAGAGGGGAA | chr11: 5235610-5235630 | 170 |
| CR001101 | HPFH | + | GGAAGGGAAGGAAAAAAAAG | chr11: 5235626-5235646 | 171 |
| CR001102 | HPFH | + | AAGACUGACAGUUCAAAUUU | chr11: 5235672-5235692 | 172 |
| CR001103 | HPFH | + | ACUGACAGUUCAAAUUUUGG | chr11: 5235675-5235695 | 173 |
| CR001104 | HPFH | + | UUCAAAUUUUGGUGGUGAUA | chr11: 5235683-5235703 | 174 |
| CR001105 | HPFH | + | AAUAGAAACUCAAACUCUGU | chr11: 5235709-5235729 | 175 |
| CR001106 | HPFH | + | GUACAAUAGUAUAACCCCUU | chr11: 5235739-5235759 | 176 |
| CR001107 | HPFH | − | CUAUUAAAGGUUUUCCAAAG | chr11: 5235756-5235776 | 177 |
| CR001108 | HPFH | − | ACUAUUAAAGGUUUUCCAAA | chr11: 5235757-5235777 | 178 |
| CR001109 | HPFH | − | UACUAUUAAAGGUUUUCCAA | chr11: 5235758-5235778 | 179 |
| CR001110 | HPFH | − | GCAUUUGUGGAUACUAUUAA | chr11: 5235769-5235789 | 180 |
| CR001111 | HPFH | + | UUAAUAGUAUCCACAAAUGC | chr11: 5235769-5235789 | 181 |
| CR001132 | HPFH | − | UAUCAAGCAUCCAGCAUUUG | chr11: 5235782-5235802 | 1500 |
| CR001133 | HPFH | − | UAUCUAAAAAUGUAAUUGCU | chr11: 5235814-5235834 | 1501 |
| CR001134 | HPFH | − | AGCAUUUCUAUACAUGUCUU | chr11: 5235862-5235882 | 1502 |
| CR001135 | HPFH | + | UAAUCAUAAAAACCUCAAAC | chr11: 5235893-5235913 | 1503 |
| CR001136 | HPFH | − | UUUAAGUGGCUACCGGUUUG | chr11: 5235908-5235928 | 1504 |
| CR001137 | HPFH | − | GUAAGCAUUUAAGUGGCUAC | chr11: 5235915-5235935 | 1505 |
| CR001138 | HPFH | − | ACUGUUGGUAAGCAUUUAAG | chr11: 5235922-5235942 | 1506 |
| CR001139 | HPFH | − | UAAUUUAUCAAUUCUACUGU | chr11: 5235937-5235957 | 1507 |
| CR001140 | HPFH | + | ACAGUAGAAUUGAUAAAUUA | chr11: 5235937-5235957 | 1508 |
| CR001141 | HPFH | + | CAAAUGCAUUUUACAGCAUU | chr11: 5236027-5236047 | 1509 |
| CR001142 | HPFH | + | GGUUGAUUAAAAGUAACCAG | chr11: 5236048-5236068 | 1510 |
| CR001143 | HPFH | − | AUAUAGUUUGAACUCACCUC | Chr11: 5236059-5236081 | 1511 |
| CR001144 | HPFH | + | UUUAUUUGUAUAUAGAAAGA | chr11: 5236090-5236110 | 1512 |
| CR001145 | HPFH | + | UGCCUGAGAUUCUGAUCACA | chr11: 5236119-5236139 | 1513 |
| CR001146 | HPFH | + | GCCUGAGAUUCUGAUCACAA | chr11: 5236120-5236140 | 1514 |
| CR001147 | HPFH | + | CCUGAGAUUCUGAUCACAAG | chr11: 5236121-5236141 | 1515 |
| CR001148 | HPFH | − | CCCCUUGUGAUCAGAAUCUC | chr11: 5236124-5236144 | 1516 |
| CR001149 | HPFH | + | AAGGGGAAAUGUUAUAAAAU | chr11: 5236138-5236158 | 1517 |
| CR001150 | HPFH | + | AGGGGAAAUGUUAUAAAAUA | chr11: 5236139-5236159 | 1518 |
| CR001151 | HPFH | + | UGUUAUAAAAUAGGGUAGAG | chr11: 5236147-5236167 | 1519 |
| CR001152 | HPFH | − | CAAAGUUUAAAGGUCAUUCA | chr11: 5236175-5236195 | 1520 |
| CR001153 | HPFH | − | UAACUUGUAACAAAGUUUAA | chr11: 5236185-5236205 | 1521 |
| CR001154 | HPFH | + | CAAGUUAUUUUUCUGUAACC | chr11: 5236198-5236218 | 1522 |
| CR001155 | HPFH | − | AAUAUCUUUCGUUGGCUUCC | chr11: 5236219-5236239 | 1523 |
| CR001156 | HPFH | − | AAUUAUUCAAUAUCUUUCGU | chr11: 5236227-5236247 | 1524 |
| CR001157 | HPFH | + | GAUAUUGAAUAAUUCAAGAA | chr11: 5236233-5236253 | 1525 |
| CR001158 | HPFH | + | AUUGAAUAAUUCAAGAAAGG | chr11: 5236236-5236256 | 1526 |
| CR001159 | HPFH | + | GAAUAAUUCAAGAAAGGUGG | chr11: 5236239-5236259 | 1527 |
| CR001160 | HPFH | + | AUUCAAGAAAGGUGGUGGCA | chr11: 5236244-5236264 | 1528 |
| CR001161 | HPFH | + | UAUUUUAGAAGUAGAGAAAA | chr11: 5236313-5236333 | 1529 |
| CR001162 | HPFH | + | AUUUUAGAAGUAGAGAAAAU | chr11: 5236314-5236334 | 1530 |
| CR001163 | HPFH | + | GAAAAUGGGAGACAAAUAGC | chr11: 5236328-5236348 | 1531 |
| CR001164 | HPFH | + | AAAAUGGGAGACAAAUAGCU | chr11: 5236329-5236349 | 1532 |
| CR001165 | HPFH | + | AGCUGGGCUUCUGUUGCAGU | chr11: 5236345-5236365 | 1533 |
| CR001166 | HPFH | + | GCUGGGCUUCUGUUGCAGUA | chr11: 5236346-5236366 | 1534 |
| CR001167 | HPFH | + | GCCAUUUCUAUUAUCAGACU | chr11: 5236383-5236403 | 1535 |
| CR001168 | HPFH | − | UCCAAGUCUGAUAAUAGAAA | chr11: 5236387-5236407 | 1536 |
| CR001169 | HPFH | + | UUAUCAGACUUGGACCAUGA | chr11: 5236393-5236413 | 1537 |
| CR001170 | HPFH | − | CACGACUGACAUCACCGUCA | chr11: 5236410-5236430 | 1538 |
| CR001171 | HPFH | + | UCAGUCGUGAACACAAGAAU | chr11: 5236421-5236441 | 1539 |
| CR001172 | HPFH | + | CAGUCGUGAACACAAGAAUA | chr11: 5236422-5236442 | 1540 |
| CR001173 | HPFH | + | GGCCACAUUUGUGAGUUUAG | chr11: 5236443-5236463 | 1541 |
| CR001174 | HPFH | − | UACCACUAAACUCACAAAUG | chr11: 5236448-5236468 | 1542 |
| CR001175 | HPFH | + | UAAAAUCAGAAAUACAGUCU | chr11: 5236471-5236491 | 1543 |
| CR001176 | HPFH | + | AAAAGAUGUACUUAGAUAUG | chr11: 5236528-5236548 | 1544 |
| CR001177 | HPFH | + | UGUACUUAGAUAUGUGGAUC | chr11: 5236534-5236554 | 1545 |
| CR001178 | HPFH | + | AGCUCAGAAAGAAUACAACC | chr11: 5236557-5236577 | 1546 |
| CR001179 | HPFH | + | ACCAGGUCAAGAAUACAGAA | chr11: 5236574-5236594 | 1547 |
| CR001180 | HPFH | − | UCCAUUCUGUAUUCUUGACC | chr11: 5236578-5236598 | 1548 |
| CR001181 | HPFH | − | CUGUCAUUUUUAACAGGUAG | chr11: 5236646-5236666 | 1549 |
| CR001182 | HPFH | − | CAUCAUCUGUCAUUUUUAAC | chr11: 5236652-5236672 | 1550 |
| CR001183 | HPFH | − | AAACACAUUCUAAGAUUUUA | chr11: 5236691-5236711 | 1551 |
| CR001184 | HPFH | + | AAUCUUAGAAUGUGUUUGUG | chr11: 5236694-5236714 | 1552 |
| CR001185 | HPFH | + | AUCUUAGAAUGUGUUUGUGA | chr11: 5236695-5236715 | 1553 |
| CR001186 | HPFH | + | UUAGAAUGUGUUUGUGAGGG | chr11: 5236698-5236718 | 1554 |
| CR001187 | HPFH | − | CAAUUUUCUUAUAUAUGAAU | chr11: 5236734-5236754 | 1555 |
| CR001188 | HPFH | + | UUGAUUCUAAAAAAAAUGUU | Chr11: 5236746-5236768 | 1556 |
| CR001189 | HPFH | + | AAAUGUUAGGUAAAUUCUUA | chr11: 5236764-5236784 | 1557 |
| CR001190 | HPFH | + | GGUAAAUUCUUAAGGCCAUG | chr11: 5236772-5236792 | 1558 |
| CR001191 | HPFH | − | AGAUCAAAUAACAGUCCUCA | chr11: 5236790-5236810 | 1559 |
| CR001192 | HPFH | + | GUCUGUUAAUUCCAAAGACU | chr11: 5236812-5236832 | 1560 |
| CR001193 | HPFH | − | AAAGUGAAAAGCCAAGUCUU | chr11: 5236826-5236846 | 1561 |
| CR001194 | HPFH | + | CCUGAAAUGAUUUUACACAU | chr11: 5236858-5236878 | 1562 |
| CR001195 | HPFH | − | CCAAUGUGUAAAAUCAUUUC | chr11: 5236861-5236881 | 1563 |
| CR001196 | HPFH | + | CUGAAAUGAUUUUACACAUU | chr11: 5236859-5236879 | 1564 |
| CR001197 | HPFH | + | AUUUUACACAUUGGGAGAUC | chr11: 5236867-5236887 | 1565 |
| CR001198 | HPFH | + | GGUUACAUGUUUAUUCUAUA | chr11: 5236888-5236908 | 1566 |
| CR001199 | HPFH | + | UCUAUAUGGAUUGCAUUGAG | chr11: 5236902-5236922 | 1567 |
| CR001200 | HPFH | + | AGGAUUUGUAUAACAGAAUA | chr11: 5236922-5236942 | 1568 |
| CR001201 | HPFH | + | UUUUCUUUUCUCUUCUGAGA | Chr11: 5236945-5236967 | 1569 |
| CR001202 | HPFH | − | GCACUCUAGCUUGGGCAAUA | chr11: 5236984-5237004 | 1570 |
| CR001203 | HPFH | − | UGCACUCUAGCUUGGGCAAU | chr11: 5236985-5237005 | 1571 |
| CR001204 | HPFH | − | UGCACCAUUGCACUCUAGCU | Chr11: 5236985-5237007 | 1572 |
| CR001205 | HPFH | − | GCUAUUCAGGUGGCUGAGGC | chr11: 5237061-5237081 | 1573 |
| CR001206 | HPFH | + | ACCUGAAUAGCUGGGACUGC | Chr11: 5237065-5237087 | 1574 |
| CR001207 | HPFH | + | GCAGGCAUGCACCACACGCC | Chr11: 5237083-5237105 | 1575 |
| CR001208 | HPFH | − | UACAAAAUCAGCCGGGCGUG | chr11: 5237102-5237122 | 1576 |
| CR001209 | HPFH | − | GGCUUGUAAACCCAGCACUU | chr11: 5237208-5237228 | 1577 |
| CR001210 | HPFH | − | CUGGCUGGAUGCGGUGGCUC | chr11: 5237229-5237249 | 1578 |
| CR001211 | HPFH | + | CUGAGCCACCGCAUCCAGCC | chr11: 5237227-5237247 | 1579 |
| CR001212 | HPFH | − | CUUAUCCUGGCUGGAUGCGG | chr11: 5237235-5237255 | 1580 |
| CR001213 | HPFH | + | CACCGCAUCCAGCCAGGAUA | chr11: 5237233-5237253 | 1581 |
| CR001214 | HPFH | − | GACCUUAUCCUGGCUGGAUG | chr11: 5237238-5237258 | 1582 |
| CR001215 | HPFH | − | CUUUUAGACCUUAUCCUGGC | chr11: 5237244-5237264 | 1583 |
| CR001216 | HPFH | + | GCCAGGAUAAGGUCUAAAAG | chr11: 5237244-5237264 | 1584 |
| CR001217 | HPFH | − | UCCACUUUUAGACCUUAUCC | chr11: 5237248-5237268 | 1585 |
| CR001218 | HPFH | + | AAUAGCAUCUACUCUUGUUC | chr11: 5237271-5237291 | 1586 |
| CR001219 | HPFH | + | CUCUUGUUCAGGAAACAAUG | chr11: 5237282-5237302 | 1587 |
| CR001220 | HPFH | + | GGAAACAAUGAGGACCUGAC | chr11: 5237292-5237312 | 1588 |
| CR001221 | HPFH | + | GAAACAAUGAGGACCUGACU | chr11: 5237293-5237313 | 1589 |
| CR001222 | HPFH | + | ACCUGACUGGGCAGUAAGAG | chr11: 5237305-5237325 | 1590 |
| CR001223 | HPFH | − | ACCACUCUUACUGCCCAGUC | chr11: 5237309-5237329 | 1591 |
| CR001224 | HPFH | + | AAGAGUGGUGAUUAAUAGAU | chr11: 5237320-5237340 | 1592 |
| CR001225 | HPFH | + | AGAGUGGUGAUUAAUAGAUA | chr11: 5237321-5237341 | 1593 |
| CR001226 | HPFH | + | AGAAUCGAACUGUUGAUUAG | chr11: 5237356-5237376 | 1594 |
| CR001227 | HPFH | + | UCGAACUGUUGAUUAGAGGU | chr11: 5237360-5237380 | 1595 |
| CR003027 | HPFH | + | CGAACUGUUGAUUAGAGGUA | chr11: 5237361-5237381 | 1692 |
| CR003028 | HPFH | + | AUGAUUUUAAUCUGUGACCU | chr11: 5237386-5237406 | 1693 |
| CR003029 | HPFH | + | UAAUCUGUGACCUUGGUGAA | chr11: 5237393-5237413 | 1694 |
| CR003030 | HPFH | + | AAUCUGUGACCUUGGUGAAU | chr11: 5237394-5237414 | 1695 |
| CR003031 | HPFH | − | AGCUACUUGCCCAUUCACCA | chr11: 5237406-5237426 | 1696 |
| CR003032 | HPFH | + | UAGCUAUCUAAUGACUAAAA | chr11: 5237421-5237441 | 1697 |
| CR003033 | HPFH | + | AUGACUAAAAUGGAAAACAC | chr11: 5237431-5237451 | 1698 |
| CR003034 | HPFH | + | AAAUACCCAUGCUGAGUCUG | chr11: 5237482-5237502 | 1699 |
| CR003035 | HPFH | − | AGGCACCUCAGACUCAGCAU | chr11: 5237490-5237510 | 1700 |
| CR003036 | HPFH | − | UAGGCACCUCAGACUCAGCA | chr11: 5237491-5237511 | 1701 |
| CR003037 | HPFH | + | GCUGAGUCUGAGGUGCCUAU | chr11: 5237492-5237512 | 1702 |
| CR003038 | HPFH | − | UAUUUAUAUAGAUGUCCUAU | chr11: 5237510-5237530 | 1703 |
| CR003039 | HPFH | − | CAUAUAUCAAACAAUGUACU | chr11: 5237535-5237555 | 1704 |
| CR003040 | HPFH | + | CCAGUACAUUGUUUGAUAUA | chr11: 5237533-5237553 | 1705 |
| CR003041 | HPFH | − | CCAUAUAUCAAACAAUGUAC | chr11: 5237536-5237556 | 1706 |
| CR003042 | HPFH | + | CAGUACAUUGUUUGAUAUAU | chr11: 5237534-5237554 | 1707 |
| CR003043 | HPFH | + | CAUUGUUUGAUAUAUGGGUU | chr11: 5237539-5237559 | 1708 |
| CR003044 | HPFH | + | GAUAUAUGGGUUUGGCACUG | chr11: 5237547-5237567 | 1709 |
| CR003045 | HPFH | + | UAUGGGUUUGGCACUGAGGU | chr11: 5237551-5237571 | 1710 |
| CR003046 | HPFH | + | GGGUUUGGCACUGAGGUUGG | chr11: 5237554-5237574 | 1711 |
| CR003047 | HPFH | + | GCACUGAGGUUGGAGGUCAG | chr11: 5237561-5237581 | 1712 |
| CR003048 | HPFH | + | CAGAGGUUAGAAAUCAGAGU | chr11: 5237578-5237598 | 1713 |
| CR003049 | HPFH | + | AGAGGUUAGAAAUCAGAGUU | chr11: 5237579-5237599 | 1714 |
| CR003050 | HPFH | + | UAGAAAUCAGAGUUGGGAAU | chr11: 5237585-5237605 | 1715 |
| CR003051 | HPFH | + | AGAAAUCAGAGUUGGGAAUU | chr11: 5237586-5237606 | 1716 |
| CR003052 | HPFH | + | GUUGGGAAUUGGGAUUAUAC | chr11: 5237596-5237616 | 1717 |
| CR003053 | HPFH | − | CUUUGUAUUCAUCACACUCU | chr11: 5237654-5237674 | 1718 |
| CR003054 | HPFH | + | AUGAAUACAAAGUUAAAUGA | chr11: 5237662-5237682 | 1719 |
| CR003055 | HPFH | − | UAAAUGUUGGUGUUCAUUAA | chr11: 5237689-5237709 | 1720 |
| CR003056 | HPFH | − | UGAGAUUUCACAUUAAAUGU | chr11: 5237702-5237722 | 1721 |
| CR003057 | HPFH | + | ACAUUUAAUGUGAAAUCUCA | chr11: 5237702-5237722 | 1722 |
| CR003058 | HPFH | − | UAAAAUCAUCGGGGAUUUUG | chr11: 5237749-5237769 | 1723 |
| CR003059 | HPFH | − | CUAAAAUCAUCGGGGAUUUU | chr11: 5237750-5237770 | 1724 |
| CR003060 | HPFH | − | UCUAAAAUCAUCGGGGAUUU | chr11: 5237751-5237771 | 1725 |
| CR003061 | HPFH | − | ACUGAGUUCUAAAAUCAUCG | chr11: 5237758-5237778 | 1726 |
| CR003062 | HPFH | − | UACUGAGUUCUAAAAUCAUC | chr11: 5237759-5237779 | 1727 |
| CR003063 | HPFH | − | AUACUGAGUUCUAAAAUCAU | chr11: 5237760-5237780 | 1728 |
| CR003064 | HPFH | + | UAAUUAGUGUAAUGCCAAUG | chr11: 5237786-5237806 | 1729 |
| CR003065 | HPFH | + | AAUUAGUGUAAUGCCAAUGU | chr11: 5237787-5237807 | 1730 |
| CR003066 | HPFH | + | AAUGCCAAUGUGGGUUAGAA | chr11: 5237796-5237816 | 1731 |
| CR003067 | HPFH | − | ACUUCCAUUCUAACCCACAU | chr11: 5237803-5237823 | 1732 |
| CR003068 | HPFH | + | AAUGGAAGUCAACUUGCUGU | chr11: 5237814-5237834 | 1733 |
| CR003069 | HPFH | + | CUUGCUGUUGGUUUCAGAGC | chr11: 5237826-5237846 | 1734 |
| CR003070 | HPFH | + | CUGUUGGUUUCAGAGCAGGU | chr11: 5237830-5237850 | 1735 |
| CR003071 | HPFH | + | UUCAGAGCAGGUAGGAGAUA | chr11: 5237838-5237858 | 1736 |
| CR003072 | HPFH | + | AGUGAAAAGCUGAAACAAAA | chr11: 5237877-5237897 | 1737 |
| CR003073 | HPFH | + | AAGCUGAAACAAAAAGGAAA | chr11: 5237883-5237903 | 1738 |
| CR003074 | HPFH | + | UGAAACAAAAAGGAAAAGGU | chr11: 5237887-5237907 | 1739 |
| CR003075 | HPFH | + | GAAACAAAAAGGAAAAGGUA | chr11: 5237888-5237908 | 1740 |
| CR003076 | HPFH | + | GGAAAAGGUAGGGUGAAAGA | chr11: 5237898-5237918 | 1741 |
| CR003077 | HPFH | + | GAAAAGGUAGGGUGAAAGAU | chr11: 5237899-5237919 | 1742 |
| CR003078 | HPFH | + | AAAGAUGGGAAAUGUAUGUA | chr11: 5237913-5237933 | 1743 |
| CR003079 | HPFH | + | GAUGGGAAAUGUAUGUAAGG | chr11: 5237916-5237936 | 1744 |
| CR003080 | HPFH | + | UGUAAGGAGGAUGAGCCACA | chr11: 5237929-5237949 | 1745 |
| CR003081 | HPFH | + | GGAGGAUGAGCCACAUGGUA | chr11: 5237934-5237954 | 1746 |
| CR003082 | HPFH | + | GAGGAUGAGCCACAUGGUAU | chr11: 5237935-5237955 | 1747 |
| CR003083 | HPFH | + | GAUGAGCCACAUGGUAUGGG | chr11: 5237938-5237958 | 1748 |
| CR003084 | HPFH | − | AGUAUACCUCCCAUACCAUG | chr11: 5237947-5237967 | 1749 |
| CR003085 | HPFH | + | AUGGUAUGGGAGGUAUACUA | chr11: 5237948-5237968 | 1750 |
| CR003086 | HPFH | + | GGAGGUAUACUAAGGACUCU | chr11: 5237956-5237976 | 1751 |
| CR003087 | HPFH | + | GAGGUAUACUAAGGACUCUA | chr11: 5237957-5237977 | 1752 |
| CR003088 | HPFH | + | ACUCUAGGGUCAGAGAAAUA | chr11: 5237971-5237991 | 1753 |
| CR003089 | HPFH | + | CUCUAGGGUCAGAGAAAUAU | chr11: 5237972-5237992 | 1754 |
| CR003090 | HPFH | − | AAGAAUGUGAAUUUUGUAGA | chr11: 5238004-5238024 | 1755 |
| CR003091 | HPFH | + | UUCUACAAAAUUCACAUUCU | chr11: 5238003-5238023 | 1756 |
| CR003092 | HPFH | + | ACAAAAUUCACAUUCUUGGC | chr11: 5238007-5238027 | 1757 |
| CR003093 | HPFH | + | CAAAAUUCACAUUCUUGGCU | chr11: 5238008-5238028 | 1758 |
| CR003094 | HPFH | + | UUCACAUUCUUGGCUGGGUG | chr11: 5238013-5238033 | 1759 |
| CR003095 | HPFH | + | AGGGUGGAUCACCUGAUGUU | chr11: 5238071-5238093 | 1760 |
| CR003096 | HPFH | − | GAUCUCGAACUCCUAACAUC | chr11: 5238090-5238110 | 1761 |

[0354] In some aspects of the invention, it is preferred that the gRNA molecule to an HPFH region comprise, e.g., consist of, a targeting domain of a gRNA capable of producing at least about a 20% increase in F cells relative to control, e.g., in an assay described in Example 4. In an aspect, the gRNA molecule includes a targeting domain comprising, e.g., consisting of, SEQ ID NO: 113. In an aspect, the gRNA molecule includes a targeting domain comprising, e.g., consisting of, SEQ ID NO: 99. In an aspect, the gRNA molecule includes a targeting domain comprising, e.g., consisting of, SEQ ID NO: 112. In an aspect, the gRNA molecule includes a targeting domain comprising, e.g., consisting of, SEQ ID NO: 98. In an aspect, the gRNA molecule includes a targeting domain comprising, e.g., consisting of, SEQ ID NO: 1580. In an aspect, the gRNA molecule includes a targeting domain comprising, e.g., consisting of, SEQ ID NO: 106. In an aspect, the gRNA molecule includes a targeting domain comprising, e.g., consisting of, SEQ ID NO: 1589. In an aspect, the gRNA molecule includes a targeting domain comprising, e.g., consisting of, SEQ ID NO: 1503. In an aspect, the gRNA molecule includes a targeting domain comprising, e.g., consisting of, SEQ ID NO: 160. In an aspect, the gRNA molecule includes a targeting domain comprising, e.g., consisting of, SEQ ID NO: 1537. In an aspect, the gRNA molecule includes a targeting domain comprising, e.g., consisting of, SEQ ID NO: 159. In an aspect, the gRNA molecule includes a targeting domain comprising, e.g., consisting of, SEQ ID NO: 101. In an aspect, the gRNA molecule includes a targeting domain comprising, e.g., consisting of, SEQ ID NO: 162. In an aspect, the gRNA molecule includes a targeting domain comprising, e.g., consisting of, SEQ ID NO: 104. In an aspect, the gRNA molecule includes a targeting domain comprising, e.g., consisting of, SEQ ID NO: 138. In an aspect, the gRNA molecule includes a targeting domain comprising, e.g., consisting of, SEQ ID NO: 1536. In an aspect, the gRNA molecule includes a targeting domain comprising, e.g., consisting of, SEQ ID NO: 1539. In an aspect, the gRNA molecule includes a targeting domain comprising, e.g., consisting of, SEQ ID NO: 1585.

[0355] In some aspects of the invention, e.g., as indicated herein, it may be beneficial to include gRNA molecules targeting more than one, e.g., two, target sites (e.g., a first gRNA molecule and a second gRNA molecule). In some embodiments, the two target sites are both located in an HPFH region. In such aspects, any combination of more than one, e.g., two, gRNA molecules (e.g., a first gRNA molecule and a second gRNA molecule) comprising targeting domains listed in Table 6 may be used. In an aspect, the first gRNA molecule and the second gRNA molecule include targeting domains comprising, e.g., consisting of, SEQ ID NO: 100 and SEQ ID NO: 165, respectively. In an aspect, the first gRNA molecule and the second gRNA molecule include targeting domains comprising, e.g., consisting of, SEQ ID NO: 100 and SEQ ID NO: 113, respectively. In an aspect, the first gRNA molecule and the second gRNA molecule include targeting domains comprising, e.g., consisting of, SEQ ID NO: 100 and SEQ ID NO: 99, respectively. In an aspect, the first gRNA molecule and the second gRNA molecule include targeting domains comprising, e.g., consisting of, SEQ ID NO: 100 and SEQ ID NO: 112, respectively. In an aspect, the first gRNA molecule and the second gRNA molecule include targeting domains comprising, e.g., consisting of, SEQ ID NO: 100 and SEQ ID NO: 98, respectively. In an aspect, the first gRNA molecule and the second gRNA molecule include targeting domains comprising, e.g., consisting of, SEQ ID NO: 100 and SEQ ID NO: 1580, respectively. In an aspect, the first gRNA molecule and the second gRNA molecule include targeting domains comprising, e.g., consisting of, SEQ ID NO: 100 and SEQ ID NO: 106, respectively. In an aspect, the first gRNA molecule and the second gRNA molecule include targeting domains comprising, e.g., consisting of, SEQ ID NO: 100 and SEQ ID NO: 1503, respectively. In an aspect, the first gRNA molecule and the second gRNA molecule include targeting domains comprising, e.g., consisting of, SEQ ID NO: 100 and SEQ ID NO: 1589, respectively. In an aspect, the first gRNA molecule and the second gRNA molecule include targeting domains comprising, e.g., consisting of, SEQ ID NO: 100 and SEQ ID NO: 160, respectively. In an aspect, the first gRNA molecule and the second gRNA molecule include targeting domains comprising, e.g., consisting of, SEQ ID NO: 100 and SEQ ID NO: 1537, respectively. In an aspect, the first gRNA molecule and the second gRNA molecule include targeting domains comprising, e.g., consisting of, SEQ ID NO: 100 and SEQ ID NO: 159, respectively. In an aspect, the first gRNA molecule and the second gRNA molecule include targeting domains comprising, e.g., consisting of, SEQ ID NO: 100 and SEQ ID NO: 101, respectively. In an aspect, the first gRNA molecule and the second gRNA molecule include targeting domains comprising, e.g., consisting of, SEQ ID NO: 100 and SEQ ID NO: 162, respectively. In an aspect, the first gRNA molecule and the second gRNA molecule include targeting domains comprising, e.g., consisting of, SEQ ID NO: 100 and SEQ ID NO: 104, respectively. In an aspect, the first gRNA molecule and the second gRNA molecule include targeting domains comprising, e.g., consisting of, SEQ ID NO: 100 and SEQ ID NO: 138, respectively. In an aspect, the first gRNA molecule and the second gRNA molecule include targeting domains comprising, e.g., consisting of, SEQ ID NO: 100 and SEQ ID NO: 1536, respectively. In an aspect, the first gRNA molecule and the second gRNA molecule include targeting domains comprising, e.g., consisting of, SEQ ID NO: 100 and SEQ ID NO: 1539, respectively. In an aspect, the first gRNA molecule and the second gRNA molecule include targeting domains comprising, e.g., consisting of, SEQ ID NO: 100 and SEQ ID NO: 1585, respectively. In an aspect, the first gRNA molecule and the second gRNA molecule include targeting domains comprising, e.g., consisting of, SEQ ID NO: 165 and SEQ ID NO: 113, respectively. In an aspect, the first gRNA molecule and the second gRNA molecule include targeting domains comprising, e.g., consisting of, SEQ ID NO: 165 and SEQ ID NO: 99, respectively. In an aspect, the first gRNA molecule and the second gRNA molecule include targeting domains comprising, e.g., consisting of, SEQ ID NO: 165 and SEQ ID NO: 112, respectively. In an aspect, the first gRNA molecule and the second gRNA molecule include targeting domains comprising, e.g., consisting of, SEQ ID NO: 165 and SEQ ID NO: 98, respectively. In an aspect, the first gRNA molecule and the second gRNA molecule include targeting domains comprising, e.g., consisting of, SEQ ID NO: 165 and SEQ ID NO: 1580, respectively. In an aspect, the first gRNA molecule and the second gRNA molecule include targeting domains comprising, e.g., consisting of, SEQ ID NO: 165 and SEQ ID NO: 106, respectively. In an aspect, the first gRNA molecule and the second gRNA molecule include targeting domains comprising, e.g., consisting of, SEQ ID NO: 165 and SEQ ID NO: 1503, respectively. In an aspect, the first gRNA molecule and the second gRNA molecule include targeting domains comprising, e.g., consisting of, SEQ ID NO: 165 and SEQ ID NO: 1589, respectively. In an aspect, the first gRNA molecule and the second gRNA molecule include targeting domains comprising, e.g., consisting of, SEQ ID NO: 165 and SEQ ID NO: 160, respectively. In an aspect, the first gRNA molecule and the second gRNA molecule include targeting domains comprising, e.g., consisting of, SEQ ID NO: 165 and SEQ ID NO: 1537, respectively. In an aspect, the first gRNA molecule and the second gRNA molecule include targeting domains comprising, e.g., consisting of, SEQ ID NO: 165 and SEQ ID NO: 159, respectively. In an aspect, the first gRNA molecule and the second gRNA molecule include targeting domains comprising, e.g., consisting of, SEQ ID NO: 165 and SEQ ID NO: 101, respectively. In an aspect, the first gRNA molecule and the second gRNA molecule include targeting domains comprising, e.g., consisting of, SEQ ID NO: 165 and SEQ ID NO: 162, respectively. In an aspect, the first gRNA molecule and the second gRNA molecule include targeting domains comprising, e.g., consisting of, SEQ ID NO: 165 and SEQ ID NO: 104, respectively. In an aspect, the first gRNA molecule and the second gRNA molecule include targeting domains comprising, e.g., consisting of, SEQ ID NO: 165 and SEQ ID NO: 138, respectively. In an aspect, the first gRNA molecule and the second gRNA molecule include targeting domains comprising, e.g., consisting of, SEQ ID NO: 165 and SEQ ID NO: 1536, respectively. In an aspect, the first gRNA molecule and the second gRNA molecule include targeting domains comprising, e.g., consisting of, SEQ ID NO: 165 and SEQ ID NO: 1539, respectively. In an aspect, the first gRNA molecule and the second gRNA molecule include targeting domains comprising, e.g., consisting of, SEQ ID NO: 165 and SEQ ID NO: 1585, respectively. In an aspect, the first gRNA molecule and the second gRNA molecule include targeting domains comprising, e.g., consisting of, SEQ ID NO: 113 and SEQ ID NO: 165, respectively. In an aspect, the first gRNA molecule and the second gRNA molecule include targeting domains comprising, e.g., consisting of, SEQ ID NO: 113 and SEQ ID NO: 99, respectively. In an aspect, the first gRNA molecule and the second gRNA molecule include targeting domains comprising, e.g., consisting of, SEQ ID NO: 113 and SEQ ID NO: 112, respectively. In an aspect, the first gRNA molecule and the second gRNA molecule include targeting domains comprising, e.g., consisting of, SEQ ID NO: 113 and SEQ ID NO: 98, respectively. In an aspect, the first gRNA molecule and the second gRNA molecule include targeting domains comprising, e.g., consisting of, SEQ ID NO: 113 and SEQ ID NO: 1580, respectively. In an aspect, the first gRNA molecule and the second gRNA molecule include targeting domains comprising, e.g., consisting of, SEQ ID NO: 113 and SEQ ID NO: 106, respectively. In an aspect, the first gRNA molecule and the second gRNA molecule include targeting domains comprising, e.g., consisting of, SEQ ID NO: 113 and SEQ ID NO: 1503, respectively. In an aspect, the first gRNA molecule and the second gRNA molecule include targeting domains comprising, e.g., consisting of, SEQ ID NO: 113 and SEQ ID NO: 1589, respectively. In an aspect, the first gRNA molecule and the second gRNA molecule include targeting domains comprising, e.g., consisting of, SEQ ID NO: 113 and SEQ ID NO: 160, respectively. In an aspect, the first gRNA molecule and the second gRNA molecule include targeting domains comprising, e.g., consisting of, SEQ ID NO: 113 and SEQ ID NO: 1537, respectively. In an aspect, the first gRNA molecule and the second gRNA molecule include targeting domains comprising, e.g., consisting of, SEQ ID NO: 113 and SEQ ID NO: 159, respectively. In an aspect, the first gRNA molecule and the second gRNA molecule include targeting domains comprising, e.g., consisting of, SEQ ID NO: 113 and SEQ ID NO: 101, respectively. In an aspect, the first gRNA molecule and the second gRNA molecule include targeting domains comprising, e.g., consisting of, SEQ ID NO: 113 and SEQ ID NO: 162, respectively. In an aspect, the first gRNA molecule and the second gRNA molecule include targeting domains comprising, e.g., consisting of, SEQ ID NO: 113 and SEQ ID NO: 104, respectively. In an aspect, the first gRNA molecule and the second gRNA molecule include targeting domains comprising, e.g., consisting of, SEQ ID NO: 113 and SEQ ID NO: 138, respectively. In an aspect, the first gRNA molecule and the second gRNA molecule include targeting domains comprising, e.g., consisting of, SEQ ID NO: 113 and SEQ ID NO: 1536, respectively. In an aspect, the first gRNA molecule and the second gRNA molecule include targeting domains comprising, e.g., consisting of, SEQ ID NO: 113 and SEQ ID NO: 1539, respectively. In an aspect, the first gRNA molecule and the second gRNA molecule include targeting domains comprising, e.g., consisting of, SEQ ID NO: 113 and SEQ ID NO: 1585, respectively. In an aspect, the first gRNA molecule and the second gRNA molecule include targeting domains comprising, e.g., consisting of, SEQ ID NO: 99 and SEQ ID NO: 165, respectively. In an aspect, the first gRNA molecule and the second gRNA molecule include targeting domains comprising, e.g., consisting of, SEQ ID NO: 99 and SEQ ID NO: 113, respectively. In an aspect, the first gRNA molecule and the second gRNA molecule include targeting domains comprising, e.g., consisting of, SEQ ID NO: 99 and SEQ ID NO: 112, respectively. In an aspect, the first gRNA molecule and the second gRNA molecule include targeting domains comprising, e.g., consisting of, SEQ ID NO: 99 and SEQ ID NO: 98, respectively. In an aspect, the first gRNA molecule and the second gRNA molecule include targeting domains comprising, e.g., consisting of, SEQ ID NO: 99 and SEQ ID NO: 1580, respectively. In an aspect, the first gRNA molecule and the second gRNA molecule include targeting domains comprising, e.g., consisting of, SEQ ID NO: 99 and SEQ ID NO: 106, respectively. In an aspect, the first gRNA molecule and the second gRNA molecule include targeting domains comprising, e.g., consisting of, SEQ ID NO: 99 and SEQ ID NO: 1503, respectively. In an aspect, the first gRNA molecule and the second gRNA molecule include targeting domains comprising, e.g., consisting of, SEQ ID NO: 99 and SEQ ID NO: 1589, respectively. In an aspect, the first gRNA molecule and the second gRNA molecule include targeting domains comprising, e.g., consisting of, SEQ ID NO: 99 and SEQ ID NO: 160, respectively. In an aspect, the first gRNA molecule and the second gRNA molecule include targeting domains comprising, e.g., consisting of, SEQ ID NO: 99 and SEQ ID NO: 1537, respectively. In an aspect, the first gRNA molecule and the second gRNA molecule include targeting domains comprising, e.g., consisting of, SEQ ID NO: 99 and SEQ ID NO: 159, respectively. In an aspect, the first gRNA molecule and the second gRNA molecule include targeting domains comprising, e.g., consisting of, SEQ ID NO: 99 and SEQ ID NO: 101, respectively. In an aspect, the first gRNA molecule and the second gRNA molecule include targeting domains comprising, e.g., consisting of, SEQ ID NO: 99 and SEQ ID NO: 162, respectively. In an aspect, the first gRNA molecule and the second gRNA molecule include targeting domains comprising, e.g., consisting of, SEQ ID NO: 99 and SEQ ID NO: 104, respectively. In an aspect, the first gRNA molecule and the second gRNA molecule include targeting domains comprising, e.g., consisting of, SEQ ID NO: 99 and SEQ ID NO: 138, respectively. In an aspect, the first gRNA molecule and the second gRNA molecule include targeting domains comprising, e.g., consisting of, SEQ ID NO: 99 and SEQ ID NO: 1536, respectively. In an aspect, the first gRNA molecule and the second gRNA molecule include targeting domains comprising, e.g., consisting of, SEQ ID NO: 99 and SEQ ID NO: 1539, respectively. In an aspect, the first gRNA molecule and the second gRNA molecule include targeting domains comprising, e.g., consisting of, SEQ ID NO: 99 and SEQ ID NO: 1585, respectively. In an aspect, the first gRNA molecule and the second gRNA molecule include targeting domains comprising, e.g., consisting of, SEQ ID NO: 112 and SEQ ID NO: 165, respectively. In an aspect, the first gRNA molecule and the second gRNA molecule include targeting domains comprising, e.g., consisting of, SEQ ID NO: 112 and SEQ ID NO: 113, respectively. In an aspect, the first gRNA molecule and the second gRNA molecule include targeting domains comprising, e.g., consisting of, SEQ ID NO: 112 and SEQ ID NO: 99, respectively. In an aspect, the first gRNA molecule and the second gRNA molecule include targeting domains comprising, e.g., consisting of, SEQ ID NO: 112 and SEQ ID NO: 98, respectively. In an aspect, the first gRNA molecule and the second gRNA molecule include targeting domains comprising, e.g., consisting of, SEQ ID NO: 112 and SEQ ID NO: 1580, respectively. In an aspect, the first gRNA molecule and the second gRNA molecule include targeting domains comprising, e.g., consisting of, SEQ ID NO: 112 and SEQ ID NO: 106, respectively. In an aspect, the first gRNA molecule and the second gRNA molecule include targeting domains comprising, e.g., consisting of, SEQ ID NO: 112 and SEQ ID NO: 1503, respectively. In an aspect, the first gRNA molecule and the second gRNA molecule include targeting domains comprising, e.g., consisting of, SEQ ID NO: 112 and SEQ ID NO: 1589, respectively. In an aspect, the first gRNA molecule and the second gRNA molecule include targeting domains comprising, e.g., consisting of, SEQ ID NO: 112 and SEQ ID NO: 160, respectively. In an aspect, the first gRNA molecule and the second gRNA molecule include targeting domains comprising, e.g., consisting of, SEQ ID NO: 112 and SEQ ID NO: 1537, respectively. In an aspect, the first gRNA molecule and the second gRNA molecule include targeting domains comprising, e.g., consisting of, SEQ ID NO: 112 and SEQ ID NO: 159, respectively. In an aspect, the first gRNA molecule and the second gRNA molecule include targeting domains comprising, e.g., consisting of, SEQ ID NO: 112 and SEQ ID NO: 101, respectively. In an aspect, the first gRNA molecule and the second gRNA molecule include targeting domains comprising, e.g., consisting of, SEQ ID NO: 112 and SEQ ID NO: 162, respectively. In an aspect, the first gRNA molecule and the second gRNA molecule include targeting domains comprising, e.g., consisting of, SEQ ID NO: 112 and SEQ ID NO: 104, respectively. In an aspect, the first gRNA molecule and the second gRNA molecule include targeting domains comprising, e.g., consisting of, SEQ ID NO: 112 and SEQ ID NO: 138, respectively. In an aspect, the first gRNA molecule and the second gRNA molecule include targeting domains comprising, e.g., consisting of, SEQ ID NO: 112 and SEQ ID NO: 1536, respectively. In an aspect, the first gRNA molecule and the second gRNA molecule include targeting domains comprising, e.g., consisting of, SEQ ID NO: 112 and SEQ ID NO: 1539, respectively. In an aspect, the first gRNA molecule and the second gRNA molecule include targeting domains comprising, e.g., consisting of, SEQ ID NO: 112 and SEQ ID NO: 1585, respectively. In an aspect, the first gRNA molecule and the second gRNA molecule include targeting domains comprising, e.g., consisting of, SEQ ID NO: 98 and SEQ ID NO: 165, respectively. In an aspect, the first gRNA molecule and the second gRNA molecule include targeting domains comprising, e.g., consisting of, SEQ ID NO: 98 and SEQ ID NO: 113, respectively. In an aspect, the first gRNA molecule and the second gRNA molecule include targeting domains comprising, e.g., consisting of, SEQ ID NO: 98 and SEQ ID NO: 99, respectively. In an aspect, the first gRNA molecule and the second gRNA molecule include targeting domains comprising, e.g., consisting of, SEQ ID NO: 98 and SEQ ID NO: 112, respectively. In an aspect, the first gRNA molecule and the second gRNA molecule include targeting domains comprising, e.g., consisting of, SEQ ID NO: 98 and SEQ ID NO: 1580, respectively. In an aspect, the first gRNA molecule and the second gRNA molecule include targeting domains comprising, e.g., consisting of, SEQ ID NO: 98 and SEQ ID NO: 106, respectively. In an aspect, the first gRNA molecule and the second gRNA molecule include targeting domains comprising, e.g., consisting of, SEQ ID NO: 98 and SEQ ID NO: 1503, respectively. In an aspect, the first gRNA molecule and the second gRNA molecule include targeting domains comprising, e.g., consisting of, SEQ ID NO: 98 and SEQ ID NO: 1589, respectively. In an aspect, the first gRNA molecule and the second gRNA molecule include targeting domains comprising, e.g., consisting of, SEQ ID NO: 98 and SEQ ID NO: 160, respectively. In an aspect, the first gRNA molecule and the second gRNA molecule include targeting domains comprising, e.g., consisting of, SEQ ID NO: 98 and SEQ ID NO: 1537, respectively. In an aspect, the first gRNA molecule and the second gRNA molecule include targeting domains comprising, e.g., consisting of, SEQ ID NO: 98 and SEQ ID NO: 159, respectively. In an aspect, the first gRNA molecule and the second gRNA molecule include targeting domains comprising, e.g., consisting of, SEQ ID NO: 98 and SEQ ID NO: 101, respectively. In an aspect, the first gRNA molecule and the second gRNA molecule include targeting domains comprising, e.g., consisting of, SEQ ID NO: 98 and SEQ ID NO: 162, respectively. In an aspect, the first gRNA molecule and the second gRNA molecule include targeting domains comprising, e.g., consisting of, SEQ ID NO: 98 and SEQ ID NO: 104, respectively. In an aspect, the first gRNA molecule and the second gRNA molecule include targeting domains comprising, e.g., consisting of, SEQ ID NO: 98 and SEQ ID NO: 138, respectively. In an aspect, the first gRNA molecule and the second gRNA molecule include targeting domains comprising, e.g., consisting of, SEQ ID NO: 98 and SEQ ID NO: 1536, respectively. In an aspect, the first gRNA molecule and the second gRNA molecule include targeting domains comprising, e.g., consisting of, SEQ ID NO: 98 and SEQ ID NO: 1539, respectively. In an aspect, the first gRNA molecule and the second gRNA molecule include targeting domains comprising, e.g., consisting of, SEQ ID NO: 98 and SEQ ID NO: 1585, respectively. In an aspect, the first gRNA molecule and the second gRNA molecule include targeting domains comprising, e.g., consisting of, SEQ ID NO: 1580 and SEQ ID NO: 165, respectively. In an aspect, the first gRNA molecule and the second gRNA molecule include targeting domains comprising, e.g., consisting of, SEQ ID NO: 1580 and SEQ ID NO: 113, respectively. In an aspect, the first gRNA molecule and the second gRNA molecule include targeting domains comprising, e.g., consisting of, SEQ ID NO: 1580 and SEQ ID NO: 99, respectively. In an aspect, the first gRNA molecule and the second gRNA molecule include targeting domains comprising, e.g., consisting of, SEQ ID NO: 1580 and SEQ ID NO: 112, respectively. In an aspect, the first gRNA molecule and the second gRNA molecule include targeting domains comprising, e.g., consisting of, SEQ ID NO: 1580 and SEQ ID NO: 98, respectively. In an aspect, the first gRNA molecule and the second gRNA molecule include targeting domains comprising, e.g., consisting of, SEQ ID NO: 1580 and SEQ ID NO: 106, respectively. In an aspect, the first gRNA molecule and the second gRNA molecule include targeting domains comprising, e.g., consisting of, SEQ ID NO: 1580 and SEQ ID NO: 1503, respectively. In an aspect, the first gRNA molecule and the second gRNA molecule include targeting domains comprising, e.g., consisting of, SEQ ID NO: 1580 and SEQ ID NO: 1589, respectively. In an aspect, the first gRNA molecule and the second gRNA molecule include targeting domains comprising, e.g., consisting of, SEQ ID NO: 1580 and SEQ ID NO: 160, respectively. In an aspect, the first gRNA molecule and the second gRNA molecule include targeting domains comprising, e.g., consisting of, SEQ ID NO: 1580 and SEQ ID NO: 1537, respectively. In an aspect, the first gRNA molecule and the second gRNA molecule include targeting domains comprising, e.g., consisting of, SEQ ID NO: 1580 and SEQ ID NO: 159, respectively. In an aspect, the first gRNA molecule and the second gRNA molecule include targeting domains comprising, e.g., consisting of, SEQ ID NO: 1580 and SEQ ID NO: 101, respectively. In an aspect, the first gRNA molecule and the second gRNA molecule include targeting domains comprising, e.g., consisting of, SEQ ID NO: 1580 and SEQ ID NO: 162, respectively. In an aspect, the first gRNA molecule and the second gRNA molecule include targeting domains comprising, e.g., consisting of, SEQ ID NO: 1580 and SEQ ID NO: 104, respectively. In an aspect, the first gRNA molecule and the second gRNA molecule include targeting domains comprising, e.g., consisting of, SEQ ID NO: 1580 and SEQ ID NO: 138, respectively. In an aspect, the first gRNA molecule and the second gRNA molecule include targeting domains comprising, e.g., consisting of, SEQ ID NO: 1580 and SEQ ID NO: 1536, respectively. In an aspect, the first gRNA molecule and the second gRNA molecule include targeting domains comprising, e.g., consisting of, SEQ ID NO: 1580 and SEQ ID NO: 1539, respectively. In an aspect, the first gRNA molecule and the second gRNA molecule include targeting domains comprising, e.g., consisting of, SEQ ID NO: 1580 and SEQ ID NO: 1585, respectively. In an aspect, the first gRNA molecule and the second gRNA molecule include targeting domains comprising, e.g., consisting of, SEQ ID NO: 106 and SEQ ID NO: 165, respectively. In an aspect, the first gRNA molecule and the second gRNA molecule include targeting domains comprising, e.g., consisting of, SEQ ID NO: 106 and SEQ ID NO: 113, respectively. In an aspect, the first gRNA molecule and the second gRNA molecule include targeting domains comprising, e.g., consisting of, SEQ ID NO: 106 and SEQ ID NO: 99, respectively. In an aspect, the first gRNA molecule and the second gRNA molecule include targeting domains comprising, e.g., consisting of, SEQ ID NO: 106 and SEQ ID NO: 112, respectively. In an aspect, the first gRNA molecule and the second gRNA molecule include targeting domains comprising, e.g., consisting of, SEQ ID NO: 106 and SEQ ID NO: 98, respectively. In an aspect, the first gRNA molecule and the second gRNA molecule include targeting domains comprising, e.g., consisting of, SEQ ID NO: 106 and SEQ ID NO: 1580, respectively. In an aspect, the first gRNA molecule and the second gRNA molecule include targeting domains comprising, e.g., consisting of, SEQ ID NO: 106 and SEQ ID NO: 1503, respectively. In an aspect, the first gRNA molecule and the second gRNA molecule include targeting domains comprising, e.g., consisting of, SEQ ID NO: 106 and SEQ ID NO: 1589, respectively. In an aspect, the first gRNA molecule and the second gRNA molecule include targeting domains comprising, e.g., consisting of, SEQ ID NO: 106 and SEQ ID NO: 160, respectively. In an aspect, the first gRNA molecule and the second gRNA molecule include targeting domains comprising, e.g., consisting of, SEQ ID NO: 106 and SEQ ID NO: 1537, respectively. In an aspect, the first gRNA molecule and the second gRNA molecule include targeting domains comprising, e.g., consisting of, SEQ ID NO: 106 and SEQ ID NO: 159, respectively. In an aspect, the first gRNA molecule and the second gRNA molecule include targeting domains comprising, e.g., consisting of, SEQ ID NO: 106 and SEQ ID NO: 101, respectively. In an aspect, the first gRNA molecule and the second gRNA molecule include targeting domains comprising, e.g., consisting of, SEQ ID NO: 106 and SEQ ID NO: 162, respectively. In an aspect, the first gRNA molecule and the second gRNA molecule include targeting domains comprising, e.g., consisting of, SEQ ID NO: 106 and SEQ ID NO: 104, respectively. In an aspect, the first gRNA molecule and the second gRNA molecule include targeting domains comprising, e.g., consisting of, SEQ ID NO: 106 and SEQ ID NO: 138, respectively. In an aspect, the first gRNA molecule and the second gRNA molecule include targeting domains comprising, e.g., consisting of, SEQ ID NO: 106 and SEQ ID NO: 1536, respectively. In an aspect, the first gRNA molecule and the second gRNA molecule include targeting domains comprising, e.g., consisting of, SEQ ID NO: 106 and SEQ ID NO: 1539, respectively. In an aspect, the first gRNA molecule and the second gRNA molecule include targeting domains comprising, e.g., consisting of, SEQ ID NO: 106 and SEQ ID NO: 1585, respectively. In an aspect, the first gRNA molecule and the second gRNA molecule include targeting domains comprising, e.g., consisting of, SEQ ID NO: 1503 and SEQ ID NO: 165, respectively. In an aspect, the first gRNA molecule and the second gRNA molecule include targeting domains comprising, e.g., consisting of, SEQ ID NO: 1503 and SEQ ID NO: 113, respectively. In an aspect, the first gRNA molecule and the second gRNA molecule include targeting domains comprising, e.g., consisting of, SEQ ID NO: 1503 and SEQ ID NO: 99, respectively. In an aspect, the first gRNA molecule and the second gRNA molecule include targeting domains comprising, e.g., consisting of, SEQ ID NO: 1503 and SEQ ID NO: 112, respectively. In an aspect, the first gRNA molecule and the second gRNA molecule include targeting domains comprising, e.g., consisting of, SEQ ID NO: 1503 and SEQ ID NO: 98, respectively. In an aspect, the first gRNA molecule and the second gRNA molecule include targeting domains comprising, e.g., consisting of, SEQ ID NO: 1503 and SEQ ID NO: 1580, respectively. In an aspect, the first gRNA molecule and the second gRNA molecule include targeting domains comprising, e.g., consisting of, SEQ ID NO: 1503 and SEQ ID NO: 106, respectively. In an aspect, the first gRNA molecule and the second gRNA molecule include targeting domains comprising, e.g., consisting of, SEQ ID NO: 1503 and SEQ ID NO: 1589, respectively. In an aspect, the first gRNA molecule and the second gRNA molecule include targeting domains comprising, e.g., consisting of, SEQ ID NO: 1503 and SEQ ID NO: 160, respectively. In an aspect, the first gRNA molecule and the second gRNA molecule include targeting domains comprising, e.g., consisting of, SEQ ID NO: 1503 and SEQ ID NO: 1537, respectively. In an aspect, the first gRNA molecule and the second gRNA molecule include targeting domains comprising, e.g., consisting of, SEQ ID NO: 1503 and SEQ ID NO: 159, respectively. In an aspect, the first gRNA molecule and the second gRNA molecule include targeting domains comprising, e.g., consisting of, SEQ ID NO: 1503 and SEQ ID NO: 101, respectively. In an aspect, the first gRNA molecule and the second gRNA molecule include targeting domains comprising, e.g., consisting of, SEQ ID NO: 1503 and SEQ ID NO: 162, respectively. In an aspect, the first gRNA molecule and the second gRNA molecule include targeting domains comprising, e.g., consisting of, SEQ ID NO: 1503 and SEQ ID NO: 104, respectively. In an aspect, the first gRNA molecule and the second gRNA molecule include targeting domains comprising, e.g., consisting of, SEQ ID NO: 1503 and SEQ ID NO: 138, respectively. In an aspect, the first gRNA molecule and the second gRNA molecule include targeting domains comprising, e.g., consisting of, SEQ ID NO: 1503 and SEQ ID NO: 1536, respectively. In an aspect, the first gRNA molecule and the second gRNA molecule include targeting domains comprising, e.g., consisting of, SEQ ID NO: 1503 and SEQ ID NO: 1539, respectively. In an aspect, the first gRNA molecule and the second gRNA molecule include targeting domains comprising, e.g., consisting of, SEQ ID NO: 1503 and SEQ ID NO: 1585, respectively. In an aspect, the first gRNA molecule and the second gRNA molecule include targeting domains comprising, e.g., consisting of, SEQ ID NO: 1589 and SEQ ID NO: 165, respectively. In an aspect, the first gRNA molecule and the second gRNA molecule include targeting domains comprising, e.g., consisting of, SEQ ID NO: 1589 and SEQ ID NO: 113, respectively. In an aspect, the first gRNA molecule and the second gRNA molecule include targeting domains comprising, e.g., consisting of, SEQ ID NO: 1589 and SEQ ID NO: 99, respectively. In an aspect, the first gRNA molecule and the second gRNA molecule include targeting domains comprising, e.g., consisting of, SEQ ID NO: 1589 and SEQ ID NO: 112, respectively. In an aspect, the first gRNA molecule and the second gRNA molecule include targeting domains comprising, e.g., consisting of, SEQ ID NO: 1589 and SEQ ID NO: 98, respectively. In an aspect, the first gRNA molecule and the second gRNA molecule include targeting domains comprising, e.g., consisting of, SEQ ID NO: 1589 and SEQ ID NO: 1580, respectively. In an aspect, the first gRNA molecule and the second gRNA molecule include targeting domains comprising, e.g., consisting of, SEQ ID NO: 1589 and SEQ ID NO: 106, respectively. In an aspect, the first gRNA molecule and the second gRNA molecule include targeting domains comprising, e.g., consisting of, SEQ ID NO: 1589 and SEQ ID NO: 1503, respectively. In an aspect, the first gRNA molecule and the second gRNA molecule include targeting domains comprising, e.g., consisting of, SEQ ID NO: 1589 and SEQ ID NO: 160, respectively. In an aspect, the first gRNA molecule and the second gRNA molecule include targeting domains comprising, e.g., consisting of, SEQ ID NO: 1589 and SEQ ID NO: 1537, respectively. In an aspect, the first gRNA molecule and the second gRNA molecule include targeting domains comprising, e.g., consisting of, SEQ ID NO: 1589 and SEQ ID NO: 159, respectively. In an aspect, the first gRNA molecule and the second gRNA molecule include targeting domains comprising, e.g., consisting of, SEQ ID NO: 1589 and SEQ ID NO: 101, respectively. In an aspect, the first gRNA molecule and the second gRNA molecule include targeting domains comprising, e.g., consisting of, SEQ ID NO: 1589 and SEQ ID NO: 162, respectively. In an aspect, the first gRNA molecule and the second gRNA molecule include targeting domains comprising, e.g., consisting of, SEQ ID NO: 1589 and SEQ ID NO: 104, respectively. In an aspect, the first gRNA molecule and the second gRNA molecule include targeting domains comprising, e.g., consisting of, SEQ ID NO: 1589 and SEQ ID NO: 138, respectively. In an aspect, the first gRNA molecule and the second gRNA molecule include targeting domains comprising, e.g., consisting of, SEQ ID NO: 1589 and SEQ ID NO: 1536, respectively. In an aspect, the first gRNA molecule and the second gRNA molecule include targeting domains comprising, e.g., consisting of, SEQ ID NO: 1589 and SEQ ID NO: 1539, respectively. In an aspect, the first gRNA molecule and the second gRNA molecule include targeting domains comprising, e.g., consisting of, SEQ ID NO: 1589 and SEQ ID NO: 1585, respectively. In an aspect, the first gRNA molecule and the second gRNA molecule include targeting domains comprising, e.g., consisting of, SEQ ID NO: 160 and SEQ ID NO: 165, respectively. In an aspect, the first gRNA molecule and the second gRNA molecule include targeting domains comprising, e.g., consisting of, SEQ ID NO: 160 and SEQ ID NO: 113, respectively. In an aspect, the first gRNA molecule and the second gRNA molecule include targeting domains comprising, e.g., consisting of, SEQ ID NO: 160 and SEQ ID NO: 99, respectively. In an aspect, the first gRNA molecule and the second gRNA molecule include targeting domains comprising, e.g., consisting of, SEQ ID NO: 160 and SEQ ID NO: 112, respectively. In an aspect, the first gRNA molecule and the second gRNA molecule include targeting domains comprising, e.g., consisting of, SEQ ID NO: 160 and SEQ ID NO: 98, respectively. In an aspect, the first gRNA molecule and the second gRNA molecule include targeting domains comprising, e.g., consisting of, SEQ ID NO: 160 and SEQ ID NO: 1580, respectively. In an aspect, the first gRNA molecule and the second gRNA molecule include targeting domains comprising, e.g., consisting of, SEQ ID NO: 160 and SEQ ID NO: 106, respectively. In an aspect, the first gRNA molecule and the second gRNA molecule include targeting domains comprising, e.g., consisting of, SEQ ID NO: 160 and SEQ ID NO: 1503, respectively. In an aspect, the first gRNA molecule and the second gRNA molecule include targeting domains comprising, e.g., consisting of, SEQ ID NO: 160 and SEQ ID NO: 1589, respectively. In an aspect, the first gRNA molecule and the second gRNA molecule include targeting domains comprising, e.g., consisting of, SEQ ID NO: 160 and SEQ ID NO: 1537, respectively. In an aspect, the first gRNA molecule and the second gRNA molecule include targeting domains comprising, e.g., consisting of, SEQ ID NO: 160 and SEQ ID NO: 159, respectively. In an aspect, the first gRNA molecule and the second gRNA molecule include targeting domains comprising, e.g., consisting of, SEQ ID NO: 160 and SEQ ID NO: 101, respectively. In an aspect, the first gRNA molecule and the second gRNA molecule include targeting domains comprising, e.g., consisting of, SEQ ID NO: 160 and SEQ ID NO: 162, respectively. In an aspect, the first gRNA molecule and the second gRNA molecule include targeting domains comprising, e.g., consisting of, SEQ ID NO: 160 and SEQ ID NO: 104, respectively. In an aspect, the first gRNA molecule and the second gRNA molecule include targeting domains comprising, e.g., consisting of, SEQ ID NO: 160 and SEQ ID NO: 138, respectively. In an aspect, the first gRNA molecule and the second gRNA molecule include targeting domains comprising, e.g., consisting of, SEQ ID NO: 160 and SEQ ID NO: 1536, respectively. In an aspect, the first gRNA molecule and the second gRNA molecule include targeting domains comprising, e.g., consisting of, SEQ ID NO: 160 and SEQ ID NO: 1539, respectively. In an aspect, the first gRNA molecule and the second gRNA molecule include targeting domains comprising, e.g., consisting of, SEQ ID NO: 160 and SEQ ID NO: 1585, respectively. In an aspect, the first gRNA molecule and the second gRNA molecule include targeting domains comprising, e.g., consisting of, SEQ ID NO: 1537 and SEQ ID NO: 165, respectively. In an aspect, the first gRNA molecule and the second gRNA molecule include targeting domains comprising, e.g., consisting of, SEQ ID NO: 1537 and SEQ ID NO: 113, respectively. In an aspect, the first gRNA molecule and the second gRNA molecule include targeting domains comprising, e.g., consisting of, SEQ ID NO: 1537 and SEQ ID NO: 99, respectively. In an aspect, the first gRNA molecule and the second gRNA molecule include targeting domains comprising, e.g., consisting of, SEQ ID NO: 1537 and SEQ ID NO: 112, respectively. In an aspect, the first gRNA molecule and the second gRNA molecule include targeting domains comprising, e.g., consisting of, SEQ ID NO: 1537 and SEQ ID NO: 98, respectively. In an aspect, the first gRNA molecule and the second gRNA molecule include targeting domains comprising, e.g., consisting of, SEQ ID NO: 1537 and SEQ ID NO: 1580, respectively. In an aspect, the first gRNA molecule and the second gRNA molecule include targeting domains comprising, e.g., consisting of, SEQ ID NO: 1537 and SEQ ID NO: 106, respectively. In an aspect, the first gRNA molecule and the second gRNA molecule include targeting domains comprising, e.g., consisting of, SEQ ID NO: 1537 and SEQ ID NO: 1503, respectively. In an aspect, the first gRNA molecule and the second gRNA molecule include targeting domains comprising, e.g., consisting of, SEQ ID NO: 1537 and SEQ ID NO: 1589, respectively. In an aspect, the first gRNA molecule and the second gRNA molecule include targeting domains comprising, e.g., consisting of, SEQ ID NO: 1537 and SEQ ID NO: 160, respectively. In an aspect, the first gRNA molecule and the second gRNA molecule include targeting domains comprising, e.g., consisting of, SEQ ID NO: 1537 and SEQ ID NO: 159, respectively. In an aspect, the first gRNA molecule and the second gRNA molecule include targeting domains comprising, e.g., consisting of, SEQ ID NO: 1537 and SEQ ID NO: 101, respectively. In an aspect, the first gRNA molecule and the second gRNA molecule include targeting domains comprising, e.g., consisting of, SEQ ID NO: 1537 and SEQ ID NO: 162, respectively. In an aspect, the first gRNA molecule and the second gRNA molecule include targeting domains comprising, e.g., consisting of, SEQ ID NO: 1537 and SEQ ID NO: 104, respectively. In an aspect, the first gRNA molecule and the second gRNA molecule include targeting domains comprising, e.g., consisting of, SEQ ID NO: 1537 and SEQ ID NO: 138, respectively. In an aspect, the first gRNA molecule and the second gRNA molecule include targeting domains comprising, e.g., consisting of, SEQ ID NO: 1537 and SEQ ID NO: 1536, respectively. In an aspect, the first gRNA molecule and the second gRNA molecule include targeting domains comprising, e.g., consisting of, SEQ ID NO: 1537 and SEQ ID NO: 1539, respectively. In an aspect, the first gRNA molecule and the second gRNA molecule include targeting domains comprising, e.g., consisting of, SEQ ID NO: 1537 and SEQ ID NO: 1585, respectively. In an aspect, the first gRNA molecule and the second gRNA molecule include targeting domains comprising, e.g., consisting of, SEQ ID NO: 159 and SEQ ID NO: 165, respectively. In an aspect, the first gRNA molecule and the second gRNA molecule include targeting domains comprising, e.g., consisting of, SEQ ID NO: 159 and SEQ ID NO: 113, respectively. In an aspect, the first gRNA molecule and the second gRNA molecule include targeting domains comprising, e.g., consisting of, SEQ ID NO: 159 and SEQ ID NO: 99, respectively. In an aspect, the first gRNA molecule and the second gRNA molecule include targeting domains comprising, e.g., consisting of, SEQ ID NO: 159 and SEQ ID NO: 112, respectively. In an aspect, the first gRNA molecule and the second gRNA molecule include targeting domains comprising, e.g., consisting of, SEQ ID NO: 159 and SEQ ID NO: 98, respectively. In an aspect, the first gRNA molecule and the second gRNA molecule include targeting domains comprising, e.g., consisting of, SEQ ID NO: 159 and SEQ ID NO: 1580, respectively. In an aspect, the first gRNA molecule and the second gRNA molecule include targeting domains comprising, e.g., consisting of, SEQ ID NO: 159 and SEQ ID NO: 106, respectively. In an aspect, the first gRNA molecule and the second gRNA molecule include targeting domains comprising, e.g., consisting of, SEQ ID NO: 159 and SEQ ID NO: 1503, respectively. In an aspect, the first gRNA molecule and the second gRNA molecule include targeting domains comprising, e.g., consisting of, SEQ ID NO: 159 and SEQ ID NO: 1589, respectively. In an aspect, the first gRNA molecule and the second gRNA molecule include targeting domains comprising, e.g., consisting of, SEQ ID NO: 159 and SEQ ID NO: 160, respectively. In an aspect, the first gRNA molecule and the second gRNA molecule include targeting domains comprising, e.g., consisting of, SEQ ID NO: 159 and SEQ ID NO: 1537, respectively. In an aspect, the first gRNA molecule and the second gRNA molecule include targeting domains comprising, e.g., consisting of, SEQ ID NO: 159 and SEQ ID NO: 101, respectively. In an aspect, the first gRNA molecule and the second gRNA molecule include targeting domains comprising, e.g., consisting of, SEQ ID NO: 159 and SEQ ID NO: 162, respectively. In an aspect, the first gRNA molecule and the second gRNA molecule include targeting domains comprising, e.g., consisting of, SEQ ID NO: 159 and SEQ ID NO: 104, respectively. In an aspect, the first gRNA molecule and the second gRNA molecule include targeting domains comprising, e.g., consisting of, SEQ ID NO: 159 and SEQ ID NO: 138, respectively. In an aspect, the first gRNA molecule and the second gRNA molecule include targeting domains comprising, e.g., consisting of, SEQ ID NO: 159 and SEQ ID NO: 1536, respectively. In an aspect, the first gRNA molecule and the second gRNA molecule include targeting domains comprising, e.g., consisting of, SEQ ID NO: 159 and SEQ ID NO: 1539, respectively. In an aspect, the first gRNA molecule and the second gRNA molecule include targeting domains comprising, e.g., consisting of, SEQ ID NO: 159 and SEQ ID NO: 1585, respectively. In an aspect, the first gRNA molecule and the second gRNA molecule include targeting domains comprising, e.g., consisting of, SEQ ID NO: 101 and SEQ ID NO: 165, respectively. In an aspect, the first gRNA molecule and the second gRNA molecule include targeting domains comprising, e.g., consisting of, SEQ ID NO: 101 and SEQ ID NO: 113, respectively. In an aspect, the first gRNA molecule and the second gRNA molecule include targeting domains comprising, e.g., consisting of, SEQ ID NO: 101 and SEQ ID NO: 99, respectively. In an aspect, the first gRNA molecule and the second gRNA molecule include targeting domains comprising, e.g., consisting of, SEQ ID NO: 101 and SEQ ID NO: 112, respectively. In an aspect, the first gRNA molecule and the second gRNA molecule include targeting domains comprising, e.g., consisting of, SEQ ID NO: 101 and SEQ ID NO: 98, respectively. In an aspect, the first gRNA molecule and the second gRNA molecule include targeting domains comprising, e.g., consisting of, SEQ ID NO: 101 and SEQ ID NO: 1580, respectively. In an aspect, the first gRNA molecule and the second gRNA molecule include targeting domains comprising, e.g., consisting of, SEQ ID NO: 101 and SEQ ID NO: 106, respectively. In an aspect, the first gRNA molecule and the second gRNA molecule include targeting domains comprising, e.g., consisting of, SEQ ID NO: 101 and SEQ ID NO: 1503, respectively. In an aspect, the first gRNA molecule and the second gRNA molecule include targeting domains comprising, e.g., consisting of, SEQ ID NO: 101 and SEQ ID NO: 1589, respectively. In an aspect, the first gRNA molecule and the second gRNA molecule include targeting domains comprising, e.g., consisting of, SEQ ID NO: 101 and SEQ ID NO: 160, respectively. In an aspect, the first gRNA molecule and the second gRNA molecule include targeting domains comprising, e.g., consisting of, SEQ ID NO: 101 and SEQ ID NO: 1537, respectively. In an aspect, the first gRNA molecule and the second gRNA molecule include targeting domains comprising, e.g., consisting of, SEQ ID NO: 101 and SEQ ID NO: 159, respectively. In an aspect, the first gRNA molecule and the second gRNA molecule include targeting domains comprising, e.g., consisting of, SEQ ID NO: 101 and SEQ ID NO: 162, respectively. In an aspect, the first gRNA molecule and the second gRNA molecule include targeting domains comprising, e.g., consisting of, SEQ ID NO: 101 and SEQ ID NO: 104, respectively. In an aspect, the first gRNA molecule and the second gRNA molecule include targeting domains comprising, e.g., consisting of, SEQ ID NO: 101 and SEQ ID NO: 138, respectively. In an aspect, the first gRNA molecule and the second gRNA molecule include targeting domains comprising, e.g., consisting of, SEQ ID NO: 101 and SEQ ID NO: 1536, respectively. In an aspect, the first gRNA molecule and the second gRNA molecule include targeting domains comprising, e.g., consisting of, SEQ ID NO: 101 and SEQ ID NO: 1539, respectively. In an aspect, the first gRNA molecule and the second gRNA molecule include targeting domains comprising, e.g., consisting of, SEQ ID NO: 101 and SEQ ID NO: 1585, respectively. In an aspect, the first gRNA molecule and the second gRNA molecule include targeting domains comprising, e.g., consisting of, SEQ ID NO: 162 and SEQ ID NO: 165, respectively. In an aspect, the first gRNA molecule and the second gRNA molecule include targeting domains comprising, e.g., consisting of, SEQ ID NO: 162 and SEQ ID NO: 113, respectively. In an aspect, the first gRNA molecule and the second gRNA molecule include targeting domains comprising, e.g., consisting of, SEQ ID NO: 162 and SEQ ID NO: 99, respectively. In an aspect, the first gRNA molecule and the second gRNA molecule include targeting domains comprising, e.g., consisting of, SEQ ID NO: 162 and SEQ ID NO: 112, respectively. In an aspect, the first gRNA molecule and the second gRNA molecule include targeting domains comprising, e.g., consisting of, SEQ ID NO: 162 and SEQ ID NO: 98, respectively. In an aspect, the first gRNA molecule and the second gRNA molecule include targeting domains comprising, e.g., consisting of, SEQ ID NO: 162 and SEQ ID NO: 1580, respectively. In an aspect, the first gRNA molecule and the second gRNA molecule include targeting domains comprising, e.g., consisting of, SEQ ID NO: 162 and SEQ ID NO: 106, respectively. In an aspect, the first gRNA molecule and the second gRNA molecule include targeting domains comprising, e.g., consisting of, SEQ ID NO: 162 and SEQ ID NO: 1503, respectively. In an aspect, the first gRNA molecule and the second gRNA molecule include targeting domains comprising, e.g., consisting of, SEQ ID NO: 162 and SEQ ID NO: 1589, respectively. In an aspect, the first gRNA molecule and the second gRNA molecule include targeting domains comprising, e.g., consisting of, SEQ ID NO: 162 and SEQ ID NO: 160, respectively. In an aspect, the first gRNA molecule and the second gRNA molecule include targeting domains comprising, e.g., consisting of, SEQ ID NO: 162 and SEQ ID NO: 1537, respectively. In an aspect, the first gRNA molecule and the second gRNA molecule include targeting domains comprising, e.g., consisting of, SEQ ID NO: 162 and SEQ ID NO: 159, respectively. In an aspect, the first gRNA molecule and the second gRNA molecule include targeting domains comprising, e.g., consisting of, SEQ ID NO: 162 and SEQ ID NO: 101, respectively. In an aspect, the first gRNA molecule and the second gRNA molecule include targeting domains comprising, e.g., consisting of, SEQ ID NO: 104 and SEQ ID NO: 165, respectively. In an aspect, the first gRNA molecule and the second gRNA molecule include targeting domains comprising, e.g., consisting of, SEQ ID NO: 104 and SEQ ID NO: 113, respectively. In an aspect, the first gRNA molecule and the second gRNA molecule include targeting domains comprising, e.g., consisting of, SEQ ID NO: 104 and SEQ ID NO: 99, respectively. In an aspect, the first gRNA molecule and the second gRNA molecule include targeting domains comprising, e.g., consisting of, SEQ ID NO: 104 and SEQ ID NO: 112, respectively. In an aspect, the first gRNA molecule and the second gRNA molecule include targeting domains comprising, e.g., consisting of, SEQ ID NO: 104 and SEQ ID NO: 98, respectively. In an aspect, the first gRNA molecule and the second gRNA molecule include targeting domains comprising, e.g., consisting of, SEQ ID NO: 104 and SEQ ID NO: 1580, respectively. In an aspect, the first gRNA molecule and the second gRNA molecule include targeting domains comprising, e.g., consisting of, SEQ ID NO: 104 and SEQ ID NO: 106, respectively. In an aspect, the first gRNA molecule and the second gRNA molecule include targeting domains comprising, e.g., consisting of, SEQ ID NO: 104 and SEQ ID NO: 1503, respectively. In an aspect, the first gRNA molecule and the second gRNA molecule include targeting domains comprising, e.g., consisting of, SEQ ID NO: 104 and SEQ ID NO: 1589, respectively. In an aspect, the first gRNA molecule and the second gRNA molecule include targeting domains comprising, e.g., consisting of, SEQ ID NO: 104 and SEQ ID NO: 160, respectively. In an aspect, the first gRNA molecule and the second gRNA molecule include targeting domains comprising, e.g., consisting of, SEQ ID NO: 104 and SEQ ID NO: 1537, respectively. In an aspect, the first gRNA molecule and the second gRNA molecule include targeting domains comprising, e.g., consisting of, SEQ ID NO: 104 and SEQ ID NO: 159, respectively. In an aspect, the first gRNA molecule and the second gRNA molecule include targeting domains comprising, e.g., consisting of, SEQ ID NO: 104 and SEQ ID NO: 101, respectively. In an aspect, the first gRNA molecule and the second gRNA molecule include targeting domains comprising, e.g., consisting of, SEQ ID NO: 104 and SEQ ID NO: 162, respectively. In an aspect, the first gRNA molecule and the second gRNA molecule include targeting domains comprising, e.g., consisting of, SEQ ID NO: 104 and SEQ ID NO: 138, respectively. In an aspect, the first gRNA molecule and the second gRNA molecule include targeting domains comprising, e.g., consisting of, SEQ ID NO: 104 and SEQ ID NO: 1536, respectively. In an aspect, the first gRNA molecule and the second gRNA molecule include targeting domains comprising, e.g., consisting of, SEQ ID NO: 104 and SEQ ID NO: 1539, respectively. In an aspect, the first gRNA molecule and the second gRNA molecule include targeting domains comprising, e.g., consisting of, SEQ ID NO: 104 and SEQ ID NO: 1585, respectively. In an aspect, the first gRNA molecule and the second gRNA molecule include targeting domains comprising, e.g., consisting of, SEQ ID NO: 138 and SEQ ID NO: 165, respectively. In an aspect, the first gRNA molecule and the second gRNA molecule include targeting domains comprising, e.g., consisting of, SEQ ID NO: 138 and SEQ ID NO: 113, respectively. In an aspect, the first gRNA molecule and the second gRNA molecule include targeting domains comprising, e.g., consisting of, SEQ ID NO: 138 and SEQ ID NO: 99, respectively. In an aspect, the first gRNA molecule and the second gRNA molecule include targeting domains comprising, e.g., consisting of, SEQ ID NO: 138 and SEQ ID NO: 112, respectively. In an aspect, the first gRNA molecule and the second gRNA molecule include targeting domains comprising, e.g., consisting of, SEQ ID NO: 138 and SEQ ID NO: 98, respectively. In an aspect, the first gRNA molecule and the second gRNA molecule include targeting domains comprising, e.g., consisting of, SEQ ID NO: 138 and SEQ ID NO: 1580, respectively. In an aspect, the first gRNA molecule and the second gRNA molecule include targeting domains comprising, e.g., consisting of, SEQ ID NO: 138 and SEQ ID NO: 106, respectively. In an aspect, the first gRNA molecule and the second gRNA molecule include targeting domains comprising, e.g., consisting of, SEQ ID NO: 138 and SEQ ID NO: 1503, respectively. In an aspect, the first gRNA molecule and the second gRNA molecule include targeting domains comprising, e.g., consisting of, SEQ ID NO: 138 and SEQ ID NO: 1589, respectively. In an aspect, the first gRNA molecule and the second gRNA molecule include targeting domains comprising, e.g., consisting of, SEQ ID NO: 138 and SEQ ID NO: 160, respectively. In an aspect, the first gRNA molecule and the second gRNA molecule include targeting domains comprising, e.g., consisting of, SEQ ID NO: 138 and SEQ ID NO: 1537, respectively. In an aspect, the first gRNA molecule and the second gRNA molecule include targeting domains comprising, e.g., consisting of, SEQ ID NO: 138 and SEQ ID NO: 159, respectively. In an aspect, the first gRNA molecule and the second gRNA molecule include targeting domains comprising, e.g., consisting of, SEQ ID NO: 138 and SEQ ID NO: 101, respectively. In an aspect, the first gRNA molecule and the second gRNA molecule include targeting domains comprising, e.g., consisting of, SEQ ID NO: 138 and SEQ ID NO: 162, respectively. In an aspect, the first gRNA molecule and the second gRNA molecule include targeting domains comprising, e.g., consisting of, SEQ ID NO: 138 and SEQ ID NO: 104, respectively. In an aspect, the first gRNA molecule and the second gRNA molecule include targeting domains comprising, e.g., consisting of, SEQ ID NO: 138 and SEQ ID NO: 1536, respectively. In an aspect, the first gRNA molecule and the second gRNA molecule include targeting domains comprising, e.g., consisting of, SEQ ID NO: 138 and SEQ ID NO: 1539, respectively. In an aspect, the first gRNA molecule and the second gRNA molecule include targeting domains comprising, e.g., consisting of, SEQ ID NO: 138 and SEQ ID NO: 1585, respectively. In an aspect, the first gRNA molecule and the second gRNA molecule include targeting domains comprising, e.g., consisting of, SEQ ID NO: 1536 and SEQ ID NO: 165, respectively. In an aspect, the first gRNA molecule and the second gRNA molecule include targeting domains comprising, e.g., consisting of, SEQ ID NO: 1536 and SEQ ID NO: 113, respectively. In an aspect, the first gRNA molecule and the second gRNA molecule include targeting domains comprising, e.g., consisting of, SEQ ID NO: 1536 and SEQ ID NO: 99, respectively. In an aspect, the first gRNA molecule and the second gRNA molecule include targeting domains comprising, e.g., consisting of, SEQ ID NO: 1536 and SEQ ID NO: 112, respectively. In an aspect, the first gRNA molecule and the second gRNA molecule include targeting domains comprising, e.g., consisting of, SEQ ID NO: 1536 and SEQ ID NO: 98, respectively. In an aspect, the first gRNA molecule and the second gRNA molecule include targeting domains comprising, e.g., consisting of, SEQ ID NO: 1536 and SEQ ID NO: 1580, respectively. In an aspect, the first gRNA molecule and the second gRNA molecule include targeting domains comprising, e.g., consisting of, SEQ ID NO: 1536 and SEQ ID NO: 106, respectively. In an aspect, the first gRNA molecule and the second gRNA molecule include targeting domains comprising, e.g., consisting of, SEQ ID NO: 1536 and SEQ ID NO: 1503, respectively. In an aspect, the first gRNA molecule and the second gRNA molecule include targeting domains comprising, e.g., consisting of, SEQ ID NO: 1536 and SEQ ID NO: 1589, respectively. In an aspect, the first gRNA molecule and the second gRNA molecule include targeting domains comprising, e.g., consisting of, SEQ ID NO: 1536 and SEQ ID NO: 160, respectively. In an aspect, the first gRNA molecule and the second gRNA molecule include targeting domains comprising, e.g., consisting of, SEQ ID NO: 1536 and SEQ ID NO: 1537, respectively. In an aspect, the first gRNA molecule and the second gRNA molecule include targeting domains comprising, e.g., consisting of, SEQ ID NO: 1536 and SEQ ID NO: 159, respectively. In an aspect, the first gRNA molecule and the second gRNA molecule include targeting domains comprising, e.g., consisting of, SEQ ID NO: 1536 and SEQ ID NO: 101, respectively. In an aspect, the first gRNA molecule and the second gRNA molecule include targeting domains comprising, e.g., consisting of, SEQ ID NO: 1536 and SEQ ID NO: 162, respectively. In an aspect, the first gRNA molecule and the second gRNA molecule include targeting domains comprising, e.g., consisting of, SEQ ID NO: 1536 and SEQ ID NO: 104, respectively. In an aspect, the first gRNA molecule and the second gRNA molecule include targeting domains comprising, e.g., consisting of, SEQ ID NO: 1536 and SEQ ID NO: 138, respectively. In an aspect, the first gRNA molecule and the second gRNA molecule include targeting domains comprising, e.g., consisting of, SEQ ID NO: 1536 and SEQ ID NO: 1539, respectively. In an aspect, the first gRNA molecule and the second gRNA molecule include targeting domains comprising, e.g., consisting of, SEQ ID NO: 1536 and SEQ ID NO: 1585, respectively. In an aspect, the first gRNA molecule and the second gRNA molecule include targeting domains comprising, e.g., consisting of, SEQ ID NO: 1539 and SEQ ID NO: 165, respectively. In an aspect, the first gRNA molecule and the second gRNA molecule include targeting domains comprising, e.g., consisting of, SEQ ID NO: 1539 and SEQ ID NO: 113, respectively. In an aspect, the first gRNA molecule and the second gRNA molecule include targeting domains comprising, e.g., consisting of, SEQ ID NO: 1539 and SEQ ID NO: 99, respectively. In an aspect, the first gRNA molecule and the second gRNA molecule include targeting domains comprising, e.g., consisting of, SEQ ID NO: 1539 and SEQ ID NO: 112, respectively. In an aspect, the first gRNA molecule and the second gRNA molecule include targeting domains comprising, e.g., consisting of, SEQ ID NO: 1539 and SEQ ID NO: 98, respectively. In an aspect, the first gRNA molecule and the second gRNA molecule include targeting domains comprising, e.g., consisting of, SEQ ID NO: 1539 and SEQ ID NO: 1580, respectively. In an aspect, the first gRNA molecule and the second gRNA molecule include targeting domains comprising, e.g., consisting of, SEQ ID NO: 1539 and SEQ ID NO: 106, respectively. In an aspect, the first gRNA molecule and the second gRNA molecule include targeting domains comprising, e.g., consisting of, SEQ ID NO: 1539 and SEQ ID NO: 1503, respectively. In an aspect, the first gRNA molecule and the second gRNA molecule include targeting domains comprising, e.g., consisting of, SEQ ID NO: 1539 and SEQ ID NO: 1589, respectively. In an aspect, the first gRNA molecule and the second gRNA molecule include targeting domains comprising, e.g., consisting of, SEQ ID NO: 1539 and SEQ ID NO: 160, respectively. In an aspect, the first gRNA molecule and the second gRNA molecule include targeting domains comprising, e.g., consisting of, SEQ ID NO: 1539 and SEQ ID NO: 1537, respectively. In an aspect, the first gRNA molecule and the second gRNA molecule include targeting domains comprising, e.g., consisting of, SEQ ID NO: 1539 and SEQ ID NO: 159, respectively. In an aspect, the first gRNA molecule and the second gRNA molecule include targeting domains comprising, e.g., consisting of, SEQ ID NO: 1539 and SEQ ID NO: 101, respectively. In an aspect, the first gRNA molecule and the second gRNA molecule include targeting domains comprising, e.g., consisting of, SEQ ID NO: 1539 and SEQ ID NO: 162, respectively. In an aspect, the first gRNA molecule and the second gRNA molecule include targeting domains comprising, e.g., consisting of, SEQ ID NO: 1539 and SEQ ID NO: 104, respectively. In an aspect, the first gRNA molecule and the second gRNA molecule include targeting domains comprising, e.g., consisting of, SEQ ID NO: 1539 and SEQ ID NO: 138, respectively. In an aspect, the first gRNA molecule and the second gRNA molecule include targeting domains comprising, e.g., consisting of, SEQ ID NO: 1539 and SEQ ID NO: 1536, respectively. In an aspect, the first gRNA molecule and the second gRNA molecule include targeting domains comprising, e.g., consisting of, SEQ ID NO: 1539 and SEQ ID NO: 1585, respectively. In an aspect, the first gRNA molecule and the second gRNA molecule include targeting domains comprising, e.g., consisting of, SEQ ID NO: 1585 and SEQ ID NO: 165, respectively. In an aspect, the first gRNA molecule and the second gRNA molecule include targeting domains comprising, e.g., consisting of, SEQ ID NO: 1585 and SEQ ID NO: 113, respectively. In an aspect, the first gRNA molecule and the second gRNA molecule include targeting domains comprising, e.g., consisting of, SEQ ID NO: 1585 and SEQ ID NO: 99, respectively. In an aspect, the first gRNA molecule and the second gRNA molecule include targeting domains comprising, e.g., consisting of, SEQ ID NO: 1585 and SEQ ID NO: 112, respectively. In an aspect, the first gRNA molecule and the second gRNA molecule include targeting domains comprising, e.g., consisting of, SEQ ID NO: 1585 and SEQ ID NO: 98, respectively. In an aspect, the first gRNA molecule and the second gRNA molecule include targeting domains comprising, e.g., consisting of, SEQ ID NO: 1585 and SEQ ID NO: 1580, respectively. In an aspect, the first gRNA molecule and the second gRNA molecule include targeting domains comprising, e.g., consisting of, SEQ ID NO: 1585 and SEQ ID NO: 106, respectively. In an aspect, the first gRNA molecule and the second gRNA molecule include targeting domains comprising, e.g., consisting of, SEQ ID NO: 1585 and SEQ ID NO: 1503, respectively. In an aspect, the first gRNA molecule and the second gRNA molecule include targeting domains comprising, e.g., consisting of, SEQ ID NO: 1585 and SEQ ID NO: 1589, respectively. In an aspect, the first gRNA molecule and the second gRNA molecule include targeting domains comprising, e.g., consisting of, SEQ ID NO: 1585 and SEQ ID NO: 160, respectively. In an aspect, the first gRNA molecule and the second gRNA molecule include targeting domains comprising, e.g., consisting of, SEQ ID NO: 1585 and SEQ ID NO: 1537, respectively. In an aspect, the first gRNA molecule and the second gRNA molecule include targeting domains comprising, e.g., consisting of, SEQ ID NO: 1585 and SEQ ID NO: 159, respectively. In an aspect, the first gRNA molecule and the second gRNA molecule include targeting domains comprising, e.g., consisting of, SEQ ID NO: 1585 and SEQ ID NO: 101, respectively. In an aspect, the first gRNA molecule and the second gRNA molecule include targeting domains comprising, e.g., consisting of, SEQ ID NO: 1585 and SEQ ID NO: 162, respectively. In an aspect, the first gRNA molecule and the second gRNA molecule include targeting domains comprising, e.g., consisting of, SEQ ID NO: 1585 and SEQ ID NO: 104, respectively. In an aspect, the first gRNA molecule and the second gRNA molecule include targeting domains comprising, e.g., consisting of, SEQ ID NO: 1585 and SEQ ID NO: 138, respectively. In an aspect, the first gRNA molecule and the second gRNA molecule include targeting domains comprising, e.g., consisting of, SEQ ID NO: 1585 and SEQ ID NO: 1536, respectively. In an aspect, the first gRNA molecule and the second gRNA molecule include targeting domains comprising, e.g., consisting of, SEQ ID NO: 1585 and SEQ ID NO: 1539, respectively.

TABLE 7
Preferred Guide RNA Targeting Domains directed to the +58
Enhancer Region of the BCL11a Gene (i.e., to a BCL11a Enhancer)

| | Exon/ | | | | SEQ ID |
|---|---|---|---|---|---|
| Id. | Feature | Strand | Targeting domain | Locations | NO: |
| CR00242 | 58 | + | UAUGCAAUUUUUGCCAAGAU | Chr2: 60494419-60494441 | 182 |
| CR00243 | 58 | + | UUUUGCCAAGAUGGGAGUAU | Chr2: 60494427-60494449 | 183 |
| CR00244 | 58 | + | UUUGCCAAGAUGGGAGUAUG | Chr2: 60494428-60494450 | 184 |
| CR00245 | 58 | + | UCAGUGAGAUGAGAUAUCAA | Chr2: 60494477-60494499 | 185 |
| CR00246 | 58 | + | CAGUGAGAUGAGAUAUCAAA | Chr2: 60494478-60494500 | 186 |
| CR00247 | 58 | + | CCAUCUCCCUAAUCUCCAAU | Chr2: 60494518-60494540 | 187 |
| CR00248 | 58 | − | CCAAUUGGAGAUUAGGGAGA | Chr2: 60494518-60494540 | 188 |
| CR00249 | 58 | − | GCUUUGCCAAUUGGAGAUUA | Chr2: 60494524-60494546 | 189 |
| CR00250 | 58 | − | GGCUUUGCCAAUUGGAGAUU | Chr2: 60494525-60494547 | 190 |
| CR00251 | 58 | + | AAUUGGCAAAGCCAGACUUG | Chr2: 60494535-60494557 | 191 |
| CR00252 | 58 | − | AGUCUGUAUUGCCCCAAGUC | Chr2: 60494546-60494568 | 192 |
| CR00253 | 58 | + | AGACUUGGGGCAAUACAGAC | Chr2: 60494548-60494570 | 193 |
| CR00255 | 58 | − | ACAUUUGGUGAUAAAUCAUU | Chr2: 60494602-60494624 | 194 |
| CR00256 | 58 | + | CCAAAUGUUCUUUCUUCAGC | Chr2: 60494617-60494639 | 195 |
| CR00257 | 58 | + | AUAAUAGUAUAUGCUUCAUA | Chr2: 60494676-60494698 | 196 |
| CR00258 | 58 | − | CGGAGCACUUACUCUGCUCU | Chr2: 60494737-60494759 | 197 |
| CR00259 | 58 | − | AGCAUUUUAGUUCACAAGCU | Chr2: 60494757-60494779 | 198 |
| CR00260 | 58 | − | UGUAACUAAUAAAUACCAGG | Chr2: 60494781-60494803 | 199 |
| CR00261 | 58 | − | AGGUGUAACUAAUAAAUACC | Chr2: 60494784-60494806 | 200 |
| CR00264 | 58 | − | UCUGACCCAAACUAGGAAUU | Chr2: 60494836-60494858 | 201 |
| CR00266 | 58 | + | AAGGAAAAGAAUAUGACGUC | Chr2: 60494883-60494905 | 202 |
| CR00267 | 58 | + | AGGAAAAGAAUAUGACGUCA | Chr2: 60494884-60494906 | 203 |
| CR00268 | 58 | + | GGAAAAGAAUAUGACGUCAG | Chr2: 60494885-60494907 | 204 |
| CR00269 | 58 | + | GAAAAGAAUAUGACGUCAGG | Chr2: 60494886-60494908 | 205 |
| CR00270 | 58 | + | UCAGGGGGAGGCAAGUCAGU | Chr2: 60494901-60494923 | 206 |
| CR00271 | 58 | + | CAGGGGGAGGCAAGUCAGUU | Chr2: 60494902-60494924 | 207 |
| CR00272 | 58 | | AUCACAUAUAGGCACCUAUC | Chr2: 60494939-60494961 | 208 |
| CR00273 | 58 | | CAGGUACCAGCUACUGUGUU | Chr2: 60494939-60494961 | 209 |
| CR00274 | 58 | | ACUAUCCACGGAUAUACACU | Chr2: 60494939-60494961 | 210 |
| CR00275 | 58 | + | CACAGUAGCUGGUACCUGAU | Chr2: 60494939-60494961 | 211 |
| CR00276 | 58 | − | AUCACAUAUAGGCACCUAUC | Chr2: 60494953-60494975 | 212 |
| CR00277 | 58 | + | UGAUAGGUGCCUAUAUGUGA | Chr2: 60494955-60494977 | 213 |
| CR00278 | 58 | + | AGGUGCCUAUAUGUGAUGGA | Chr2: 60494959-60494981 | 214 |
| CR00279 | 58 | + | GGUGCCUAUAUGUGAUGGAU | Chr2: 60494960-60494982 | 215 |
| CR00280 | 58 | − | UCCACCCAUCCAUCACAUAU | Chr2: 60494964-60494986 | 216 |
| CR00281 | 58 | + | ACAGCCCGACAGAUGAAAAA | Chr2: 60494986-60495008 | 217 |
| CR00282 | 58 | + | AUGAAAAAUGGACAAUUAUG | Chr2: 60494998-60495020 | 218 |
| CR00283 | 58 | + | AAAAAUGGACAAUUAUGAGG | Chr2: 60495001-60495023 | 219 |
| CR00284 | 58 | + | AAAAUGGACAAUUAUGAGGA | Chr2: 60495002-60495024 | 220 |
| CR00285 | 58 | + | AAAUGGACAAUUAUGAGGAG | Chr2: 60495003-60495025 | 221 |
| CR00286 | 58 | + | GAGGAGGGGAGAGUGCAGAC | Chr2: 60495017-60495039 | 222 |
| CR00287 | 58 | + | AGGAGGGGAGAGUGCAGACA | Chr2: 60495018-60495040 | 223 |
| CR00288 | 58 | + | CUUCACCUCCUUUACAAUUU | Chr2: 60495045-60495067 | 224 |
| CR00289 | 58 | + | UUCACCUCCUUUACAAUUUU | Chr2: 60495046-60495068 | 225 |
| CR00290 | 58 | − | GACUCCCAAAAUUGUAAAGG | Chr2: 60495050-60495072 | 226 |
| CR00291 | 58 | − | GUGGACUCCCAAAAUUGUAA | Chr2: 60495053-60495075 | 227 |
| CR00292 | 58 | + | UUUUGGGAGUCCACACGGCA | Chr2: 60495062-60495084 | 228 |
| CR00293 | 58 | − | AAUUUGUAUGCCAUGCCGUG | Chr2: 60495072-60495094 | 229 |
| CR00294 | 58 | + | CCAAGAGAGCCUUCCGAAAG | Chr2: 60495135-60495157 | 230 |
| CR00295 | 58 | − | CCAGGGGGGCCUCUUUCGGA | Chr2: 60495144-60495166 | 231 |
| CR00296 | 58 | + | CCUUCCGAAAGAGGCCCCCC | Chr2: 60495144-60495166 | 232 |
| CR00297 | 58 | + | CUUCCGAAAGAGGCCCCCCU | Chr2: 60495145-60495167 | 233 |
| CR00298 | 58 | + | AAGAGGCCCCCCUGGGCAAA | Chr2: 60495152-60495174 | 234 |
| CR00299 | 58 | − | CGGUGGCCGUUUGCCCAGGG | Chr2: 60495158-60495180 | 235 |
| CR00300 | 58 | − | UCGGUGGCCGUUUGCCCAGG | Chr2: 60495159-60495181 | 236 |
| CR00301 | 58 | − | AUCGGUGGCCGUUUGCCCAG | Chr2: 60495160-60495182 | 237 |
| CR00302 | 58 | − | CAUCGGUGGCCGUUUGCCCA | Chr2: 60495161-60495183 | 238 |
| CR00303 | 58 | + | CCUGGGCAAACGGCCACCGA | Chr2: 60495162-60495184 | 239 |
| CR00304 | 58 | − | CCAUCGGUGGCCGUUUGCCC | Chr2: 60495162-60495184 | 240 |
| CR00305 | 58 | + | GCAAACGGCCACCGAUGGAG | Chr2: 60495167-60495189 | 241 |
| CR00306 | 58 | − | CUGGCAGACCUCUCCAUCGG | Chr2: 60495175-60495197 | 242 |
| CR00307 | 58 | − | GGACUGGCAGACCUCUCCAU | Chr2: 60495178-60495200 | 243 |
| CR00308 | 58 | − | UCUGAUUAGGGUGGGGGCGU | Chr2: 60495213-60495235 | 244 |
| CR00309 | 58 | + | CACGCCCCCACCCUAAUCAG | Chr2: 60495215-60495237 | 245 |
| CR00310 | 58 | − | UUGGCCUCUGAUUAGGGUGG | Chr2: 60495219-60495241 | 246 |
| CR00311 | 58 | − | UUUGGCCUCUGAUUAGGGUG | Chr2: 60495220-60495242 | 247 |
| CR00312 | 58 | − | GUUUGGCCUCUGAUUAGGGU | Chr2: 60495221-60495243 | 248 |
| CR00313 | 58 | − | GGUUUGGCCUCUGAUUAGGG | Chr2: 60495222-60495244 | 249 |
| CR00314 | 58 | − | AAGGGUUUGGCCUCUGAUUA | Chr2: 60495225-60495247 | 250 |
| CR00315 | 58 | − | GAAGGGUUUGGCCUCUGAUU | Chr2: 60495226-60495248 | 251 |
| CR00316 | 58 | − | UUGCUUUUAUCACAGGCUCC | Chr2: 60495248-60495270 | 252 |
| CR00317 | 58 | − | CUAACAGUUGCUUUUAUCAC | Chr2: 60495255-60495277 | 253 |
| CR00318 | 58 | + | CUUCAAAGUUGUAUUGACCC | Chr2: 60495293-60495315 | 254 |
| CR00319 | 58 | − | ACUCUUAGACAUAACACACC | Chr2: 60495311-60495333 | 255 |
| CR00320 | 58 | + | UAGAUGCCAUAUCUCUUUUC | Chr2: 60495333-60495355 | 256 |
| CR00321 | 58 | − | CAUAGGCCAGAAAAGAGAUA | Chr2: 60495339-60495361 | 257 |
| CR00322 | 58 | + | GGCCUAUGUUAUUACCUGUA | Chr2: 60495354-60495376 | 258 |
| CR00323 | 58 | − | GUCCAUACAGGUAAUAACAU | Chr2: 60495356-60495378 | 259 |
| CR00324 | 58 | + | UACCUGUAUGGACUUUGCAC | Chr2: 60495366-60495388 | 260 |
| CR00325 | 58 | − | UUCCAGUGCAAAGUCCAUAC | Chr2: 60495368-60495390 | 261 |
| CR00326 | 58 | + | UGCUCUUACUUAUGCACACC | Chr2: 60495400-60495422 | 262 |
| CR00327 | 58 | + | GCUCUUACUUAUGCACACCU | Chr2: 60495401-60495423 | 263 |
| CR00328 | 58 | + | CUCUUACUUAUGCACACCUG | Chr2: 60495402-60495424 | 264 |
| CR00329 | 58 | − | CAGGGCUGGCUCUAUGCCCC | Chr2: 60495418-60495440 | 265 |
| CR00330 | 58 | − | GCUGAAAAGCGAUACAGGGC | Chr2: 60495432-60495454 | 266 |
| CR00331 | 58 | − | GAUGGCUGAAAAGCGAUACA | Chr2: 60495436-60495458 | 267 |
| CR00332 | 58 | − | AGAUGGCUGAAAAGCGAUAC | Chr2: 60495437-60495459 | 268 |
| CR00333 | 58 | − | GGGAGUUAUCUGUAGUGAGA | Chr2: 60495454-60495476 | 269 |
| CR00334 | 58 | − | AAGGCAGCUAGACAGGACUU | Chr2: 60495474-60495496 | 270 |
| CR00335 | 58 | − | GAAGGCAGCUAGACAGGACU | Chr2: 60495475-60495497 | 271 |
| CR00336 | 58 | − | GAUAAGGAAGGCAGCUAGAC | Chr2: 60495481-60495503 | 272 |
| CR00337 | 58 | + | CUAGCUGCCUUCCUUAUCAC | Chr2: 60495486-60495508 | 273 |
| CR00338 | 58 | − | UGGGUGCUAUUCCUGUGAUA | Chr2: 60495497-60495519 | 274 |
| CR00339 | 58 | + | UAUCACAGGAAUAGCACCCA | Chr2: 60495500-60495522 | 275 |
| CR00340 | 58 | − | CUGAGGUACUGAUGGACCUU | Chr2: 60495516-60495538 | 276 |
| CR00341 | 58 | − | UCUGAGGUACUGAUGGACCU | Chr2: 60495517-60495539 | 277 |
| CR001124 | 58 | − | UUAGGGUGGGGGCGUGGGUG | Chr2: 60495214-60495236 | 334 |
| CR001125 | 58 | − | UUUUAUCACAGGCUCCAGGA | Chr2: 60495215-60495237 | 335 |
| CR001126 | 58 | − | UUUAUCACAGGCUCCAGGAA | Chr2: 60495216-60495238 | 336 |
| CR001127 | 58 | − | CACAGGCUCCAGGAAGGGUU | Chr2: 60495220-60495242 | 337 |
| CR001128 | 58 | + | AUCAGAGGCCAAACCCUUCC | Chr2: 60495236-60495258 | 338 |
| CR001129 | 58 | − | CUCUGAUUAGGGUGGGGGCG | Chr2: 60495244-60495266 | 339 |
| CR001130 | 58 | − | GAUUAGGGUGGGGGCGUGGG | Chr2: 60495249-60495271 | 340 |
| CR001131 | 58 | − | AUUAGGGUGGGGGCGUGGGU | Chr2: 60495250-60495272 | 341 |

[0356] In some aspects of the invention, it is preferred that the gRNA molecule to the +58 Enhancer region of BCL11a comprise a targeting domain of a gRNA listed in FIG. 11. In an aspect, the gRNA molecule includes a targeting domain comprising, e.g., consisting of, SEQ ID NO: 341. In an aspect, the gRNA molecule includes a targeting domain comprising, e.g., consisting of, SEQ ID NO: 246. In an aspect, the gRNA molecule includes a targeting domain comprising, e.g., consisting of, SEQ ID NO: 248. In an aspect, the gRNA molecule includes a targeting domain comprising, e.g., consisting of, SEQ ID NO: 247. In an aspect, the gRNA molecule includes a targeting domain comprising, e.g., consisting of, SEQ ID NO: 245. In an aspect, the gRNA molecule includes a targeting domain comprising, e.g., consisting of, SEQ ID NO: 249. In an aspect, the gRNA molecule includes a targeting domain comprising, e.g., consisting of, SEQ ID NO: 244. In an aspect, the gRNA molecule includes a targeting domain comprising, e.g., consisting of, SEQ ID NO: 199. In an aspect, the gRNA molecule includes a targeting domain comprising, e.g., consisting of, SEQ ID NO: 251. In an aspect, the gRNA molecule includes a targeting domain comprising, e.g., consisting of, SEQ ID NO: 250. In an aspect, the gRNA molecule includes a targeting domain comprising, e.g., consisting of, SEQ ID NO: 334. In an aspect, the gRNA molecule includes a targeting domain comprising, e.g., consisting of, SEQ ID NO: 185. In an aspect, the gRNA molecule includes a targeting domain comprising, e.g., consisting of, SEQ ID NO: 186. In an aspect, the gRNA molecule includes a targeting domain comprising, e.g., consisting of, SEQ ID NO: 336. In an aspect, the gRNA molecule includes a targeting domain comprising, e.g., consisting of, SEQ ID NO: 337.

[0357] In some aspects of the invention, e.g., as indicated herein, it may be beneficial to include gRNA moleucles targeting more than one, e.g., two, target sites (e.g., a first gRNA molecule and a second gRNA molecule). In some embodiments, the two target sites are both located in the +58 BCL11a enhancer region. In such aspects, any combination of more than one, e.g., two, gRNA molecules (e.g., a first gRNA molecule and a second gRNA molecule) comprising targeting domains listed in Table 7 may be used. In an aspect, the first gRNA molecule and the second gRNA molecule include targeting domains comprising, e.g., consisting of, SEQ ID NO: 341 and SEQ ID NO: 244, respectively. In an aspect, the first gRNA molecule and the second gRNA molecule include targeting domains comprising, e.g., consisting of, SEQ ID NO: 341 and SEQ ID NO: 199, respectively. In an aspect, the first gRNA molecule and the second gRNA molecule include targeting domains comprising, e.g., consisting of, SEQ ID NO: 341 and SEQ ID NO: 251, respectively. In an aspect, the first gRNA molecule and the second gRNA molecule include targeting domains comprising, e.g., consisting of, SEQ ID NO: 341 and SEQ ID NO: 250, respectively. In an aspect, the first gRNA molecule and the second gRNA molecule include targeting domains comprising, e.g., consisting of, SEQ ID NO: 341 and SEQ ID NO: 334, respectively. In an aspect, the first gRNA molecule and the second gRNA molecule include targeting domains comprising, e.g., consisting of, SEQ ID NO: 341 and SEQ ID NO: 185, respectively. In an aspect, the first gRNA molecule and the second gRNA molecule include targeting domains comprising, e.g., consisting of, SEQ ID NO: 341 and SEQ ID NO: 186, respectively. In an aspect, the first gRNA molecule and the second gRNA molecule include targeting domains comprising, e.g., consisting of, SEQ ID NO: 341 and SEQ ID NO: 336, respectively. In an aspect, the first gRNA molecule and the second gRNA molecule include targeting domains comprising, e.g., consisting of, SEQ ID NO: 341 and SEQ ID NO: 337, respectively. In an aspect, the first gRNA molecule and the second gRNA molecule include targeting domains comprising, e.g., consisting of, SEQ ID NO: 341 and SEQ ID NO: 246, respectively. In an aspect, the first gRNA molecule and the second gRNA molecule include targeting domains comprising, e.g., consisting of, SEQ ID NO: 341 and SEQ ID NO: 248, respectively. In an aspect, the first gRNA molecule and the second gRNA molecule include targeting domains comprising, e.g., consisting of, SEQ ID NO: 341 and SEQ ID NO: 247, respectively. In an aspect, the first gRNA molecule and the second gRNA molecule include targeting domains comprising, e.g., consisting of, SEQ ID NO: 341 and SEQ ID NO: 245, respectively. In an aspect, the first gRNA molecule and the second gRNA molecule include targeting domains comprising, e.g., consisting of, SEQ ID NO: 341 and SEQ ID NO: 249, respectively. In an aspect, the first gRNA molecule and the second gRNA molecule include targeting domains comprising, e.g., consisting of, SEQ ID NO: 341 and SEQ ID NO: 244, respectively. In an aspect, the first gRNA molecule and the second gRNA molecule include targeting domains comprising, e.g., consisting of, SEQ ID NO: 341 and SEQ ID NO: 199, respectively. In an aspect, the first gRNA molecule and the second gRNA molecule include targeting domains comprising, e.g., consisting of, SEQ ID NO: 341 and SEQ ID NO: 251, respectively. In an aspect, the first gRNA molecule and the second gRNA molecule include targeting domains comprising, e.g., consisting of, SEQ ID NO: 341 and SEQ ID NO: 250, respectively. In an aspect, the first gRNA molecule and the second gRNA molecule include targeting domains comprising, e.g., consisting of, SEQ ID NO: 341 and SEQ ID NO: 334, respectively. In an aspect, the first gRNA molecule and the second gRNA molecule include targeting domains comprising, e.g., consisting of, SEQ ID NO: 341 and SEQ ID NO: 185, respectively. In an aspect, the first gRNA molecule and the second gRNA molecule include targeting domains comprising, e.g., consisting of, SEQ ID NO: 341 and SEQ ID NO: 186, respectively. In an aspect, the first gRNA molecule and the second gRNA molecule include targeting domains comprising, e.g., consisting of, SEQ ID NO: 341 and SEQ ID NO: 336, respectively. In an aspect, the first gRNA molecule and the second gRNA molecule include targeting domains comprising, e.g., consisting of, SEQ ID NO: 341 and SEQ ID NO: 337, respectively. In an aspect, the first gRNA molecule and the second gRNA molecule include targeting domains comprising, e.g., consisting of, SEQ ID NO: 246 and SEQ ID NO: 244, respectively. In an aspect, the first gRNA molecule and the second gRNA molecule include targeting domains comprising, e.g., consisting of, SEQ ID NO: 246 and SEQ ID NO: 199, respectively. In an aspect, the first gRNA molecule and the second gRNA molecule include targeting domains comprising, e.g., consisting of, SEQ ID NO: 246 and SEQ ID NO: 251, respectively. In an aspect, the first gRNA molecule and the second gRNA molecule include targeting domains comprising, e.g., consisting of, SEQ ID NO: 246 and SEQ ID NO: 250, respectively. In an aspect, the first gRNA molecule and the second gRNA molecule include targeting domains comprising, e.g., consisting of, SEQ ID NO: 246 and SEQ ID NO: 334, respectively. In an aspect, the first gRNA molecule and the second gRNA molecule include targeting domains comprising, e.g., consisting of, SEQ ID NO: 246 and SEQ ID NO: 185, respectively. In an aspect, the first gRNA molecule and the second gRNA molecule include targeting domains comprising, e.g., consisting of, SEQ ID NO: 246 and SEQ ID NO: 186, respectively. In an aspect, the first gRNA molecule and the second gRNA molecule include targeting domains comprising, e.g., consisting of, SEQ ID NO: 246 and SEQ ID NO: 336, respectively. In an aspect, the first gRNA molecule and the second gRNA molecule include targeting domains comprising, e.g., consisting of, SEQ ID NO: 246 and SEQ ID NO: 337, respectively. In an aspect, the first gRNA molecule and the second gRNA molecule include targeting domains comprising, e.g., consisting of, SEQ ID NO: 246 and SEQ ID NO: 248, respectively. In an aspect, the first gRNA molecule and the second gRNA molecule include targeting domains comprising, e.g., consisting of, SEQ ID NO: 246 and SEQ ID NO: 247, respectively. In an aspect, the first gRNA molecule and the second gRNA molecule include targeting domains comprising, e.g., consisting of, SEQ ID NO: 246 and SEQ ID NO: 245, respectively. In an aspect, the first gRNA molecule and the second gRNA molecule include targeting domains comprising, e.g., consisting of, SEQ ID NO: 246 and SEQ ID NO: 249, respectively. In an aspect, the first gRNA molecule and the second gRNA molecule include targeting domains comprising, e.g., consisting of, SEQ ID NO: 246 and SEQ ID NO: 244, respectively. In an aspect, the first gRNA molecule and the second gRNA molecule include targeting domains comprising, e.g., consisting of, SEQ ID NO: 246 and SEQ ID NO: 199, respectively. In an aspect, the first gRNA molecule and the second gRNA molecule include targeting domains comprising, e.g., consisting of, SEQ ID NO: 246 and SEQ ID NO: 251, respectively. In an aspect, the first gRNA molecule and the second gRNA molecule include targeting domains comprising, e.g., consisting of, SEQ ID NO: 246 and SEQ ID NO: 250, respectively. In an aspect, the first gRNA molecule and the second gRNA molecule include targeting domains comprising, e.g., consisting of, SEQ ID NO: 246 and SEQ ID NO: 334, respectively. In an aspect, the first gRNA molecule and the second gRNA molecule include targeting domains comprising, e.g., consisting of, SEQ ID NO: 246 and SEQ ID NO: 185, respectively. In an aspect, the first gRNA molecule and the second gRNA molecule include targeting domains comprising, e.g., consisting of, SEQ ID NO: 246 and SEQ ID NO: 186, respectively. In an aspect, the first gRNA molecule and the second gRNA molecule include targeting domains comprising, e.g., consisting of, SEQ ID NO: 246 and SEQ ID NO: 336, respectively. In an aspect, the first gRNA molecule and the second gRNA molecule include targeting domains comprising, e.g., consisting of, SEQ ID NO: 246 and SEQ ID NO: 337, respectively. In an aspect, the first gRNA molecule and the second gRNA molecule include targeting domains comprising, e.g., consisting of, SEQ ID NO: 248 and SEQ ID NO: 244, respectively. In an aspect, the first gRNA molecule and the second gRNA molecule include targeting domains comprising, e.g., consisting of, SEQ ID NO: 248 and SEQ ID NO: 199, respectively. In an aspect, the first gRNA molecule and the second gRNA molecule include targeting domains comprising, e.g., consisting of, SEQ ID NO: 248 and SEQ ID NO: 251, respectively. In an aspect, the first gRNA molecule and the second gRNA molecule include targeting domains comprising, e.g., consisting of, SEQ ID NO: 248 and SEQ ID NO: 250, respectively. In an aspect, the first gRNA molecule and the second gRNA molecule include targeting domains comprising, e.g., consisting of, SEQ ID NO: 248 and SEQ ID NO: 334, respectively. In an aspect, the first gRNA molecule and the second gRNA molecule include targeting domains comprising, e.g., consisting of, SEQ ID NO: 248 and SEQ ID NO: 185, respectively. In an aspect, the first gRNA molecule and the second gRNA molecule include targeting domains comprising, e.g., consisting of, SEQ ID NO: 248 and SEQ ID NO: 186, respectively. In an aspect, the first gRNA molecule and the second gRNA molecule include targeting domains comprising, e.g., consisting of, SEQ ID NO: 248 and SEQ ID NO: 336, respectively. In an aspect, the first gRNA molecule and the second gRNA molecule include targeting domains comprising, e.g., consisting of, SEQ ID NO: 248 and SEQ ID NO: 337, respectively. In an aspect, the first gRNA molecule and the second gRNA molecule include targeting domains comprising, e.g., consisting of, SEQ ID NO: 248 and SEQ ID NO: 246, respectively. In an aspect, the first gRNA molecule and the second gRNA molecule include targeting domains comprising, e.g., consisting of, SEQ ID NO: 248 and SEQ ID NO: 247, respectively. In an aspect, the first gRNA molecule and the second gRNA molecule include targeting domains comprising, e.g., consisting of, SEQ ID NO: 248 and SEQ ID NO: 245, respectively. In an aspect, the first gRNA molecule and the second gRNA molecule include targeting domains comprising, e.g., consisting of, SEQ ID NO: 248 and SEQ ID NO: 249, respectively. In an aspect, the first gRNA molecule and the second gRNA molecule include targeting domains comprising, e.g., consisting of, SEQ ID NO: 248 and SEQ ID NO: 244, respectively. In an aspect, the first gRNA molecule and the second gRNA molecule include targeting domains comprising, e.g., consisting of, SEQ ID NO: 248 and SEQ ID NO: 199, respectively. In an aspect, the first gRNA molecule and the second gRNA molecule include targeting domains comprising, e.g., consisting of, SEQ ID NO: 248 and SEQ ID NO: 251, respectively. In an aspect, the first gRNA molecule and the second gRNA molecule include targeting domains comprising, e.g., consisting of, SEQ ID NO: 248 and SEQ ID NO: 250, respectively. In an aspect, the first gRNA molecule and the second gRNA molecule include targeting domains comprising, e.g., consisting of, SEQ ID NO: 248 and SEQ ID NO: 334, respectively. In an aspect, the first gRNA molecule and the second gRNA molecule include targeting domains comprising, e.g., consisting of, SEQ ID NO: 248 and SEQ ID NO: 185, respectively. In an aspect, the first gRNA molecule and the second gRNA molecule include targeting domains comprising, e.g., consisting of, SEQ ID NO: 248 and SEQ ID NO: 186, respectively. In an aspect, the first gRNA molecule and the second gRNA molecule include targeting domains comprising, e.g., consisting of, SEQ ID NO: 248 and SEQ ID NO: 336, respectively. In an aspect, the first gRNA molecule and the second gRNA molecule include targeting domains comprising, e.g., consisting of, SEQ ID NO: 248 and SEQ ID NO: 337, respectively. In an aspect, the first gRNA molecule and the second gRNA molecule include targeting domains comprising, e.g., consisting of, SEQ ID NO: 247 and SEQ ID NO: 244, respectively. In an aspect, the first gRNA molecule and the second gRNA molecule include targeting domains comprising, e.g., consisting of, SEQ ID NO: 247 and SEQ ID NO: 199, respectively. In an aspect, the first gRNA molecule and the second gRNA molecule include targeting domains comprising, e.g., consisting of, SEQ ID NO: 247 and SEQ ID NO: 251, respectively. In an aspect, the first gRNA molecule and the second gRNA molecule include targeting domains comprising, e.g., consisting of, SEQ ID NO: 247 and SEQ ID NO: 250, respectively. In an aspect, the first gRNA molecule and the second gRNA molecule include targeting domains comprising, e.g., consisting of, SEQ ID NO: 247 and SEQ ID NO: 334, respectively. In an aspect, the first gRNA molecule and the second gRNA molecule include targeting domains comprising, e.g., consisting of, SEQ ID NO: 247 and SEQ ID NO: 185, respectively. In an aspect, the first gRNA molecule and the second gRNA molecule include targeting domains comprising, e.g., consisting of, SEQ ID NO: 247 and SEQ ID NO: 186, respectively. In an aspect, the first gRNA molecule and the second gRNA molecule include targeting domains comprising, e.g., consisting of, SEQ ID NO: 247 and SEQ ID NO: 336, respectively. In an aspect, the first gRNA molecule and the second gRNA molecule include targeting domains comprising, e.g., consisting of, SEQ ID NO: 247 and SEQ ID NO: 337, respectively. In an aspect, the first gRNA molecule and the second gRNA molecule include targeting domains comprising, e.g., consisting of, SEQ ID NO: 247 and SEQ ID NO: 246, respectively. In an aspect, the first gRNA molecule and the second gRNA molecule include targeting domains comprising, e.g., consisting of, SEQ ID NO: 247 and SEQ ID NO: 248, respectively. In an aspect, the first gRNA molecule and the second gRNA molecule include targeting domains comprising, e.g., consisting of, SEQ ID NO: 247 and SEQ ID NO: 245, respectively. In an aspect, the first gRNA molecule and the second gRNA molecule include targeting domains comprising, e.g., consisting of, SEQ ID NO: 247 and SEQ ID NO: 249, respectively. In an aspect, the first gRNA molecule and the second gRNA molecule include targeting domains comprising, e.g., consisting of, SEQ ID NO: 247 and SEQ ID NO: 244, respectively. In an aspect, the first gRNA molecule and the second gRNA molecule include targeting domains comprising, e.g., consisting of, SEQ ID NO: 247 and SEQ ID NO: 199, respectively. In an aspect, the first gRNA molecule and the second gRNA molecule include targeting domains comprising, e.g., consisting of, SEQ ID NO: 247 and SEQ ID NO: 251, respectively. In an aspect, the first gRNA molecule and the second gRNA molecule include targeting domains comprising, e.g., consisting of, SEQ ID NO: 247 and SEQ ID NO: 250, respectively. In an aspect, the first gRNA molecule and the second gRNA molecule include targeting domains comprising, e.g., consisting of, SEQ ID NO: 247 and SEQ ID NO: 334, respectively. In an aspect, the first gRNA molecule and the second gRNA molecule include targeting domains comprising, e.g., consisting of, SEQ ID NO: 247 and SEQ ID NO: 185, respectively. In an aspect, the first gRNA molecule and the second gRNA molecule include targeting domains comprising, e.g., consisting of, SEQ ID NO: 247 and SEQ ID NO: 186, respectively. In an aspect, the first gRNA molecule and the second gRNA molecule include targeting domains comprising, e.g., consisting of, SEQ ID NO: 247 and SEQ ID NO: 336, respectively. In an aspect, the first gRNA molecule and the second gRNA molecule include targeting domains comprising, e.g., consisting of, SEQ ID NO: 247 and SEQ ID NO: 337, respectively. In an aspect, the first gRNA molecule and the second gRNA molecule include targeting domains comprising, e.g., consisting of, SEQ ID NO: 245 and SEQ ID NO: 244, respectively. In an aspect, the first gRNA molecule and the second gRNA molecule include targeting domains comprising, e.g., consisting of, SEQ ID NO: 245 and SEQ ID NO: 199, respectively. In an aspect, the first gRNA molecule and the second gRNA molecule include targeting domains comprising, e.g., consisting of, SEQ ID NO: 245 and SEQ ID NO: 251, respectively. In an aspect, the first gRNA molecule and the second gRNA molecule include targeting domains comprising, e.g., consisting of, SEQ ID NO: 245 and SEQ ID NO: 250, respectively. In an aspect, the first gRNA molecule and the second gRNA molecule include targeting domains comprising, e.g., consisting of, SEQ ID NO: 245 and SEQ ID NO: 334, respectively. In an aspect, the first gRNA molecule and the second gRNA molecule include targeting domains comprising, e.g., consisting of, SEQ ID NO: 245 and SEQ ID NO: 185, respectively. In an aspect, the first gRNA molecule and the second gRNA molecule include targeting domains comprising, e.g., consisting of, SEQ ID NO: 245 and SEQ ID NO: 186, respectively. In an aspect, the first gRNA molecule and the second gRNA molecule include targeting domains comprising, e.g., consisting of, SEQ ID NO: 245 and SEQ ID NO: 336, respectively. In an aspect, the first gRNA molecule and the second gRNA molecule include targeting domains comprising, e.g., consisting of, SEQ ID NO: 245 and SEQ ID NO: 337, respectively. In an aspect, the first gRNA molecule and the second gRNA molecule include targeting domains comprising, e.g., consisting of, SEQ ID NO: 245 and SEQ ID NO: 246, respectively. In an aspect, the first gRNA molecule and the second gRNA molecule include targeting domains comprising, e.g., consisting of, SEQ ID NO: 245 and SEQ ID NO: 248, respectively. In an aspect, the first gRNA molecule and the second gRNA molecule include targeting domains comprising, e.g., consisting of, SEQ ID NO: 245 and SEQ ID NO: 247, respectively. In an aspect, the first gRNA molecule and the second gRNA molecule include targeting domains comprising, e.g., consisting of, SEQ ID NO: 245 and SEQ ID NO: 249, respectively. In an aspect, the first gRNA molecule and the second gRNA molecule include targeting domains comprising, e.g., consisting of, SEQ ID NO: 245 and SEQ ID NO: 244, respectively. In an aspect, the first gRNA molecule and the second gRNA molecule include targeting domains comprising, e.g., consisting of, SEQ ID NO: 245 and SEQ ID NO: 199, respectively. In an aspect, the first gRNA molecule and the second gRNA molecule include targeting domains comprising, e.g., consisting of, SEQ ID NO: 245 and SEQ ID NO: 251, respectively. In an aspect, the first gRNA molecule and the second gRNA molecule include targeting domains comprising, e.g., consisting of, SEQ ID NO: 245 and SEQ ID NO: 250, respectively. In an aspect, the first gRNA molecule and the second gRNA molecule include targeting domains comprising, e.g., consisting of, SEQ ID NO: 245 and SEQ ID NO: 334, respectively. In an aspect, the first gRNA molecule and the second gRNA molecule include targeting domains comprising, e.g., consisting of, SEQ ID NO: 245 and SEQ ID NO: 185, respectively. In an aspect, the first gRNA molecule and the second gRNA molecule include targeting domains comprising, e.g., consisting of, SEQ ID NO: 245 and SEQ ID NO: 186, respectively. In an aspect, the first gRNA molecule and the second gRNA molecule include targeting domains comprising, e.g., consisting of, SEQ ID NO: 245 and SEQ ID NO: 336, respectively. In an aspect, the first gRNA molecule and the second gRNA molecule include targeting domains comprising, e.g., consisting of, SEQ ID NO: 245 and SEQ ID NO: 337, respectively. In an aspect, the first gRNA molecule and the second gRNA molecule include targeting domains comprising, e.g., consisting of, SEQ ID NO: 249 and SEQ ID NO: 244, respectively. In an aspect, the first gRNA molecule and the second gRNA molecule include targeting domains comprising, e.g., consisting of, SEQ ID NO: 249 and SEQ ID NO: 199, respectively. In an aspect, the first gRNA molecule and the second gRNA molecule include targeting domains comprising, e.g., consisting of, SEQ ID NO: 249 and SEQ ID NO: 251, respectively. In an aspect, the first gRNA molecule and the second gRNA molecule include targeting domains comprising, e.g., consisting of, SEQ ID NO: 249 and SEQ ID NO: 250, respectively. In an aspect, the first gRNA molecule and the second gRNA molecule include targeting domains comprising, e.g., consisting of, SEQ ID NO: 249 and SEQ ID NO: 334, respectively. In an aspect, the first gRNA molecule and the second gRNA molecule include targeting domains comprising, e.g., consisting of, SEQ ID NO: 249 and SEQ ID NO: 185, respectively. In an aspect, the first gRNA molecule and the second gRNA molecule include targeting domains comprising, e.g., consisting of, SEQ ID NO: 249 and SEQ ID NO: 186, respectively. In an aspect, the first gRNA molecule and the second gRNA molecule include targeting domains comprising, e.g., consisting of, SEQ ID NO: 249 and SEQ ID NO: 336, respectively. In an aspect, the first gRNA molecule and the second gRNA molecule include targeting domains comprising, e.g., consisting of, SEQ ID NO: 249 and SEQ ID NO: 337, respectively. In an aspect, the first gRNA molecule and the second gRNA molecule include targeting domains comprising, e.g., consisting of, SEQ ID NO: 249 and SEQ ID NO: 246, respectively. In an aspect, the first gRNA molecule and the second gRNA molecule include targeting domains comprising, e.g., consisting of, SEQ ID NO: 249 and SEQ ID NO: 248, respectively. In an aspect, the first gRNA molecule and the second gRNA molecule include targeting domains comprising, e.g., consisting of, SEQ ID NO: 249 and SEQ ID NO: 247, respectively. In an aspect, the first gRNA molecule and the second gRNA molecule include targeting domains comprising, e.g., consisting of, SEQ ID NO: 249 and SEQ ID NO: 245, respectively. In an aspect, the first gRNA molecule and the second gRNA molecule include targeting domains comprising, e.g., consisting of, SEQ ID NO: 249 and SEQ ID NO: 244, respectively. In an aspect, the first gRNA molecule and the second gRNA molecule include targeting domains comprising, e.g., consisting of, SEQ ID NO: 249 and SEQ ID NO: 199, respectively. In an aspect, the first gRNA molecule and the second gRNA molecule include targeting domains comprising, e.g., consisting of, SEQ ID NO: 249 and SEQ ID NO: 251, respectively. In an aspect, the first gRNA molecule and the second gRNA molecule include targeting domains comprising, e.g., consisting of, SEQ ID NO: 249 and SEQ ID NO: 250, respectively. In an aspect, the first gRNA molecule and the second gRNA molecule include targeting domains comprising, e.g., consisting of, SEQ ID NO: 249 and SEQ ID NO: 334, respectively. In an aspect, the first gRNA molecule and the second gRNA molecule include targeting domains comprising, e.g., consisting of, SEQ ID NO: 249 and SEQ ID NO: 185, respectively. In an aspect, the first gRNA molecule and the second gRNA molecule include targeting domains comprising, e.g., consisting of, SEQ ID NO: 249 and SEQ ID NO: 186, respectively. In an aspect, the first gRNA molecule and the second gRNA molecule include targeting domains comprising, e.g., consisting of, SEQ ID NO: 249 and SEQ ID NO: 336, respectively. In an aspect, the first gRNA molecule and the second gRNA molecule include targeting domains comprising, e.g., consisting of, SEQ ID NO: 249 and SEQ ID NO: 337, respectively. In an aspect, the first gRNA molecule and the second gRNA molecule include targeting domains comprising, e.g., consisting of, SEQ ID NO: 244 and SEQ ID NO: 199, respectively. In an aspect, the first gRNA molecule and the second gRNA molecule include targeting domains comprising, e.g., consisting of, SEQ ID NO: 244 and SEQ ID NO: 251, respectively. In an aspect, the first gRNA molecule and the second gRNA molecule include targeting domains comprising, e.g., consisting of, SEQ ID NO: 244 and SEQ ID NO: 250, respectively. In an aspect, the first gRNA molecule and the second gRNA molecule include targeting domains comprising, e.g., consisting of, SEQ ID NO: 244 and SEQ ID NO: 334, respectively. In an aspect, the first gRNA molecule and the second gRNA molecule include targeting domains comprising, e.g., consisting of, SEQ ID NO: 244 and SEQ ID NO: 185, respectively. In an aspect, the first gRNA molecule and the second gRNA molecule include targeting domains comprising, e.g., consisting of, SEQ ID NO: 244 and SEQ ID NO: 186, respectively. In an aspect, the first gRNA molecule and the second gRNA molecule include targeting domains comprising, e.g., consisting of, SEQ ID NO: 244 and SEQ ID NO: 336, respectively. In an aspect, the first gRNA molecule and the second gRNA molecule include targeting domains comprising, e.g., consisting of, SEQ ID NO: 244 and SEQ ID NO: 337, respectively. In an aspect, the first gRNA molecule and the second gRNA molecule include targeting domains comprising, e.g., consisting of, SEQ ID NO: 244 and SEQ ID NO: 246, respectively. In an aspect, the first gRNA molecule and the second gRNA molecule include targeting domains comprising, e.g., consisting of, SEQ ID NO: 244 and SEQ ID NO: 248, respectively. In an aspect, the first gRNA molecule and the second gRNA molecule include targeting domains comprising, e.g., consisting of, SEQ ID NO: 244 and SEQ ID NO: 247, respectively. In an aspect, the first gRNA molecule and the second gRNA molecule include targeting domains comprising, e.g., consisting of, SEQ ID NO: 244 and SEQ ID NO: 245, respectively. In an aspect, the first gRNA molecule and the second gRNA molecule include targeting domains comprising, e.g., consisting of, SEQ ID NO: 244 and SEQ ID NO: 249, respectively. In an aspect, the first gRNA molecule and the second gRNA molecule include targeting domains comprising, e.g., consisting of, SEQ ID NO: 244 and SEQ ID NO: 199, respectively. In an aspect, the first gRNA molecule and the second gRNA molecule include targeting domains comprising, e.g., consisting of, SEQ ID NO: 244 and SEQ ID NO: 251, respectively. In an aspect, the first gRNA molecule and the second gRNA molecule include targeting domains comprising, e.g., consisting of, SEQ ID NO: 244 and SEQ ID NO: 250, respectively. In an aspect, the first gRNA molecule and the second gRNA molecule include targeting domains comprising, e.g., consisting of, SEQ ID NO: 244 and SEQ ID NO: 334, respectively. In an aspect, the first gRNA molecule and the second gRNA molecule include targeting domains comprising, e.g., consisting of, SEQ ID NO: 244 and SEQ ID NO: 185, respectively. In an aspect, the first gRNA molecule and the second gRNA molecule include targeting domains comprising, e.g., consisting of, SEQ ID NO: 244 and SEQ ID NO: 186, respectively. In an aspect, the first gRNA molecule and the second gRNA molecule include targeting domains comprising, e.g., consisting of, SEQ ID NO: 244 and SEQ ID NO: 336, respectively. In an aspect, the first gRNA molecule and the second gRNA molecule include targeting domains comprising, e.g., consisting of, SEQ ID NO: 244 and SEQ ID NO: 337, respectively. In an aspect, the first gRNA molecule and the second gRNA molecule include targeting domains comprising, e.g., consisting of, SEQ ID NO: 199 and SEQ ID NO: 244, respectively. In an aspect, the first gRNA molecule and the second gRNA molecule include targeting domains comprising, e.g., consisting of, SEQ ID NO: 199 and SEQ ID NO: 251, respectively. In an aspect, the first gRNA molecule and the second gRNA molecule include targeting domains comprising, e.g., consisting of, SEQ ID NO: 199 and SEQ ID NO: 250, respectively. In an aspect, the first gRNA molecule and the second gRNA molecule include targeting domains comprising, e.g., consisting of, SEQ ID NO: 199 and SEQ ID NO: 334, respectively. In an aspect, the first gRNA molecule and the second gRNA molecule include targeting domains comprising, e.g., consisting of, SEQ ID NO: 199 and SEQ ID NO: 185, respectively. In an aspect, the first gRNA molecule and the second gRNA molecule include targeting domains comprising, e.g., consisting of, SEQ ID NO: 199 and SEQ ID NO: 186, respectively. In an aspect, the first gRNA molecule and the second gRNA molecule include targeting domains comprising, e.g., consisting of, SEQ ID NO: 199 and SEQ ID NO: 336, respectively. In an aspect, the first gRNA molecule and the second gRNA molecule include targeting domains comprising, e.g., consisting of, SEQ ID NO: 199 and SEQ ID NO: 337, respectively. In an aspect, the first gRNA molecule and the second gRNA molecule include targeting domains comprising, e.g., consisting of, SEQ ID NO: 199 and SEQ ID NO: 246, respectively. In an aspect, the first gRNA molecule and the second gRNA molecule include targeting domains comprising, e.g., consisting of, SEQ ID NO: 199 and SEQ ID NO: 248, respectively. In an aspect, the first gRNA molecule and the second gRNA molecule include targeting domains comprising, e.g., consisting of, SEQ ID NO: 199 and SEQ ID NO: 247, respectively. In an aspect, the first gRNA molecule and the second gRNA molecule include targeting domains comprising, e.g., consisting of, SEQ ID NO: 199 and SEQ ID NO: 245, respectively. In an aspect, the first gRNA molecule and the second gRNA molecule include targeting domains comprising, e.g., consisting of, SEQ ID NO: 199 and SEQ ID NO: 249, respectively. In an aspect, the first gRNA molecule and the second gRNA molecule include targeting domains comprising, e.g., consisting of, SEQ ID NO: 199 and SEQ ID NO: 244, respectively. In an aspect, the first gRNA molecule and the second gRNA molecule include targeting domains comprising, e.g., consisting of, SEQ ID NO: 199 and SEQ ID NO: 251, respectively. In an aspect, the first gRNA molecule and the second gRNA molecule include targeting domains comprising, e.g., consisting of, SEQ ID NO: 199 and SEQ ID NO: 250, respectively. In an aspect, the first gRNA molecule and the second gRNA molecule include targeting domains comprising, e.g., consisting of, SEQ ID NO: 199 and SEQ ID NO: 334, respectively. In an aspect, the first gRNA molecule and the second gRNA molecule include targeting domains comprising, e.g., consisting of, SEQ ID NO: 199 and SEQ ID NO: 185, respectively. In an aspect, the first gRNA molecule and the second gRNA molecule include targeting domains comprising, e.g., consisting of, SEQ ID NO: 199 and SEQ ID NO: 186, respectively. In an aspect, the first gRNA molecule and the second gRNA molecule include targeting domains comprising, e.g., consisting of, SEQ ID NO: 199 and SEQ ID NO: 336, respectively. In an aspect, the first gRNA molecule and the second gRNA molecule include targeting domains comprising, e.g., consisting of, SEQ ID NO: 199 and SEQ ID NO: 337, respectively. In an aspect, the first gRNA molecule and the second gRNA molecule include targeting domains comprising, e.g., consisting of, SEQ ID NO: 251 and SEQ ID NO: 244, respectively. In an aspect, the first gRNA molecule and the second gRNA molecule include targeting domains comprising, e.g., consisting of, SEQ ID NO: 251 and SEQ ID NO: 199, respectively. In an aspect, the first gRNA molecule and the second gRNA molecule include targeting domains comprising, e.g., consisting of, SEQ ID NO: 251 and SEQ ID NO: 250, respectively. In an aspect, the first gRNA molecule and the second gRNA molecule include targeting domains comprising, e.g., consisting of, SEQ ID NO: 251 and SEQ ID NO: 334, respectively. In an aspect, the first gRNA molecule and the second gRNA molecule include targeting domains comprising, e.g., consisting of, SEQ ID NO: 251 and SEQ ID NO: 185, respectively. In an aspect, the first gRNA molecule and the second gRNA molecule include targeting domains comprising, e.g., consisting of, SEQ ID NO: 251 and SEQ ID NO: 186, respectively. In an aspect, the first gRNA molecule and the second gRNA molecule include targeting domains comprising, e.g., consisting of, SEQ ID NO: 251 and SEQ ID NO: 336, respectively. In an aspect, the first gRNA molecule and the second gRNA molecule include targeting domains comprising, e.g., consisting of, SEQ ID NO: 251 and SEQ ID NO: 337, respectively. In an aspect, the first gRNA molecule and the second gRNA molecule include targeting domains comprising, e.g., consisting of, SEQ ID NO: 251 and SEQ ID NO: 246, respectively. In an aspect, the first gRNA molecule and the second gRNA molecule include targeting domains comprising, e.g., consisting of, SEQ ID NO: 251 and SEQ ID NO: 248, respectively. In an aspect, the first gRNA molecule and the second gRNA molecule include targeting domains comprising, e.g., consisting of, SEQ ID NO: 251 and SEQ ID NO: 247, respectively. In an aspect, the first gRNA molecule and the second gRNA molecule include targeting domains comprising, e.g., consisting of, SEQ ID NO: 251 and SEQ ID NO: 245, respectively. In an aspect, the first gRNA molecule and the second gRNA molecule include targeting domains comprising, e.g., consisting of, SEQ ID NO: 251 and SEQ ID NO: 249, respectively. In an aspect, the first gRNA molecule and the second gRNA molecule include targeting domains comprising, e.g., consisting of, SEQ ID NO: 251 and SEQ ID NO: 244, respectively. In an aspect, the first gRNA molecule and the second gRNA molecule include targeting domains comprising, e.g., consisting of, SEQ ID NO: 251 and SEQ ID NO: 199, respectively. In an aspect, the first gRNA molecule and the second gRNA molecule include targeting domains comprising, e.g., consisting of, SEQ ID NO: 251 and SEQ ID NO: 250, respectively. In an aspect, the first gRNA molecule and the second gRNA molecule include targeting domains comprising, e.g., consisting of, SEQ ID NO: 251 and SEQ ID NO: 334, respectively. In an aspect, the first gRNA molecule and the second gRNA molecule include targeting domains comprising, e.g., consisting of, SEQ ID NO: 251 and SEQ ID NO: 185, respectively. In an aspect, the first gRNA molecule and the second gRNA molecule include targeting domains comprising, e.g., consisting of, SEQ ID NO: 251 and SEQ ID NO: 186, respectively. In an aspect, the first gRNA molecule and the second gRNA molecule include targeting domains comprising, e.g., consisting of, SEQ ID NO: 251 and SEQ ID NO: 336, respectively. In an aspect, the first gRNA molecule and the second gRNA molecule include targeting domains comprising, e.g., consisting of, SEQ ID NO: 251 and SEQ ID NO: 337, respectively. In an aspect, the first gRNA molecule and the second gRNA molecule include targeting domains comprising, e.g., consisting of, SEQ ID NO: 250 and SEQ ID NO: 244, respectively. In an aspect, the first gRNA molecule and the second gRNA molecule include targeting domains comprising, e.g., consisting of, SEQ ID NO: 250 and SEQ ID NO: 199, respectively. In an aspect, the first gRNA molecule and the second gRNA molecule include targeting domains comprising, e.g., consisting of, SEQ ID NO: 250 and SEQ ID NO: 251, respectively. In an aspect, the first gRNA molecule and the second gRNA molecule include targeting domains comprising, e.g., consisting of, SEQ ID NO: 250 and SEQ ID NO: 334, respectively. In an aspect, the first gRNA molecule and the second gRNA molecule include targeting domains comprising, e.g., consisting of, SEQ ID NO: 250 and SEQ ID NO: 185, respectively. In an aspect, the first gRNA molecule and the second gRNA molecule include targeting domains comprising, e.g., consisting of, SEQ ID NO: 250 and SEQ ID NO: 186, respectively. In an aspect, the first gRNA molecule and the second gRNA molecule include targeting domains comprising, e.g., consisting of, SEQ ID NO: 250 and SEQ ID NO: 336, respectively. In an aspect, the first gRNA molecule and the second gRNA molecule include targeting domains comprising, e.g., consisting of, SEQ ID NO: 250 and SEQ ID NO: 337, respectively. In an aspect, the first gRNA molecule and the second gRNA molecule include targeting domains comprising, e.g., consisting of, SEQ ID NO: 250 and SEQ ID NO: 246, respectively. In an aspect, the first gRNA molecule and the second gRNA molecule include targeting domains comprising, e.g., consisting of, SEQ ID NO: 250 and SEQ ID NO: 248, respectively. In an aspect, the first gRNA molecule and the second gRNA molecule include targeting domains comprising, e.g., consisting of, SEQ ID NO: 250 and SEQ ID NO: 247, respectively. In an aspect, the first gRNA molecule and the second gRNA molecule include targeting domains comprising, e.g., consisting of, SEQ ID NO: 250 and SEQ ID NO: 245, respectively. In an aspect, the first gRNA molecule and the second gRNA molecule include targeting domains comprising, e.g., consisting of, SEQ ID NO: 250 and SEQ ID NO: 249, respectively. In an aspect, the first gRNA molecule and the second gRNA molecule include targeting domains comprising, e.g., consisting of, SEQ ID NO: 250 and SEQ ID NO: 244, respectively. In an aspect, the first gRNA molecule and the second gRNA molecule include targeting domains comprising, e.g., consisting of, SEQ ID NO: 250 and SEQ ID NO: 199, respectively. In an aspect, the first gRNA molecule and the second gRNA molecule include targeting domains comprising, e.g., consisting of, SEQ ID NO: 250 and SEQ ID NO: 251, respectively. In an aspect, the first gRNA molecule and the second gRNA molecule include targeting domains comprising, e.g., consisting of, SEQ ID NO: 250 and SEQ ID NO: 334, respectively. In an aspect, the first gRNA molecule and the second gRNA molecule include targeting domains comprising, e.g., consisting of, SEQ ID NO: 250 and SEQ ID NO: 185, respectively. In an aspect, the first gRNA molecule and the second gRNA molecule include targeting domains comprising, e.g., consisting of, SEQ ID NO: 250 and SEQ ID NO: 186, respectively. In an aspect, the first gRNA molecule and the second gRNA molecule include targeting domains comprising, e.g., consisting of, SEQ ID NO: 250 and SEQ ID NO: 336, respectively. In an aspect, the first gRNA molecule and the second gRNA molecule include targeting domains comprising, e.g., consisting of, SEQ ID NO: 250 and SEQ ID NO: 337, respectively. In an aspect, the first gRNA molecule and the second gRNA molecule include targeting domains comprising, e.g., consisting of, SEQ ID NO: 334 and SEQ ID NO: 244, respectively. In an aspect, the first gRNA molecule and the second gRNA molecule include targeting domains comprising, e.g., consisting of, SEQ ID NO: 334 and SEQ ID NO: 199, respectively. In an aspect, the first gRNA molecule and the second gRNA molecule include targeting domains comprising, e.g., consisting of, SEQ ID NO: 334 and SEQ ID NO: 251, respectively. In an aspect, the first gRNA molecule and the second gRNA molecule include targeting domains comprising, e.g., consisting of, SEQ ID NO: 334 and SEQ ID NO: 250, respectively. In an aspect, the first gRNA molecule and the second gRNA molecule include targeting domains comprising, e.g., consisting of, SEQ ID NO: 334 and SEQ ID NO: 185, respectively. In an aspect, the first gRNA molecule and the second gRNA molecule include targeting domains comprising, e.g., consisting of, SEQ ID NO: 334 and SEQ ID NO: 186, respectively. In an aspect, the first gRNA molecule and the second gRNA molecule include targeting domains comprising, e.g., consisting of, SEQ ID NO: 334 and SEQ ID NO: 336, respectively. In an aspect, the first gRNA molecule and the second gRNA molecule include targeting domains comprising, e.g., consisting of, SEQ ID NO: 334 and SEQ ID NO: 337, respectively. In an aspect, the first gRNA molecule and the second gRNA molecule include targeting domains comprising, e.g., consisting of, SEQ ID NO: 334 and SEQ ID NO: 246, respectively. In an aspect, the first gRNA molecule and the second gRNA molecule include targeting domains comprising, e.g., consisting of, SEQ ID NO: 334 and SEQ ID NO: 248, respectively. In an aspect, the first gRNA molecule and the second gRNA molecule include targeting domains comprising, e.g., consisting of, SEQ ID NO: 334 and SEQ ID NO: 247, respectively. In an aspect, the first gRNA molecule and the second gRNA molecule include targeting domains comprising, e.g., consisting of, SEQ ID NO: 334 and SEQ ID NO: 245, respectively. In an aspect, the first gRNA molecule and the second gRNA molecule include targeting domains comprising, e.g., consisting of, SEQ ID NO: 334 and SEQ ID NO: 249, respectively. In an aspect, the first gRNA molecule and the second gRNA molecule include targeting domains comprising, e.g., consisting of, SEQ ID NO: 334 and SEQ ID NO: 244, respectively. In an aspect, the first gRNA molecule and the second gRNA molecule include targeting domains comprising, e.g., consisting of, SEQ ID NO: 334 and SEQ ID NO: 199, respectively. In an aspect, the first gRNA molecule and the second gRNA molecule include targeting domains comprising, e.g., consisting of, SEQ ID NO: 334 and SEQ ID NO: 251, respectively. In an aspect, the first gRNA molecule and the second gRNA molecule include targeting domains comprising, e.g., consisting of, SEQ ID NO: 334 and SEQ ID NO: 250, respectively. In an aspect, the first gRNA molecule and the second gRNA molecule include targeting domains comprising, e.g., consisting of, SEQ ID NO: 334 and SEQ ID NO: 185, respectively. In an aspect, the first gRNA molecule and the second gRNA molecule include targeting domains comprising, e.g., consisting of, SEQ ID NO: 334 and SEQ ID NO: 186, respectively. In an aspect, the first gRNA molecule and the second gRNA molecule include targeting domains comprising, e.g., consisting of, SEQ ID NO: 334 and SEQ ID NO: 336, respectively. In an aspect, the first gRNA molecule and the second gRNA molecule include targeting domains comprising, e.g., consisting of, SEQ ID NO: 334 and SEQ ID NO: 337, respectively. In an aspect, the first gRNA molecule and the second gRNA molecule include targeting domains comprising, e.g., consisting of, SEQ ID NO: 185 and SEQ ID NO: 244, respectively. In an aspect, the first gRNA molecule and the second gRNA molecule include targeting domains comprising, e.g., consisting of, SEQ ID NO: 185 and SEQ ID NO: 199, respectively. In an aspect, the first gRNA molecule and the second gRNA molecule include targeting domains comprising, e.g., consisting of, SEQ ID NO: 185 and SEQ ID NO: 251, respectively. In an aspect, the first gRNA molecule and the second gRNA molecule include targeting domains comprising, e.g., consisting of, SEQ ID NO: 185 and SEQ ID NO: 250, respectively. In an aspect, the first gRNA molecule and the second gRNA molecule include targeting domains comprising, e.g., consisting of, SEQ ID NO: 185 and SEQ ID NO: 334, respectively. In an aspect, the first gRNA molecule and the second gRNA molecule include targeting domains comprising, e.g., consisting of, SEQ ID NO: 185 and SEQ ID NO: 186, respectively. In an aspect, the first gRNA molecule and the second gRNA molecule include targeting domains comprising, e.g., consisting of, SEQ ID NO: 185 and SEQ ID NO: 336, respectively. In an aspect, the first gRNA molecule and the second gRNA molecule include targeting domains comprising, e.g., consisting of, SEQ ID NO: 185 and SEQ ID NO: 337, respectively. In an aspect, the first gRNA molecule and the second gRNA molecule include targeting domains comprising, e.g., consisting of, SEQ ID NO: 185 and SEQ ID NO: 246, respectively. In an aspect, the first gRNA molecule and the second gRNA molecule include targeting domains comprising, e.g., consisting of, SEQ ID NO: 185 and SEQ ID NO: 248, respectively. In an aspect, the first gRNA molecule and the second gRNA molecule include targeting domains comprising, e.g., consisting of, SEQ ID NO: 185 and SEQ ID NO: 247, respectively. In an aspect, the first gRNA molecule and the second gRNA molecule include targeting domains comprising, e.g., consisting of, SEQ ID NO: 185 and SEQ ID NO: 245, respectively. In an aspect, the first gRNA molecule and the second gRNA molecule include targeting domains comprising, e.g., consisting of, SEQ ID NO: 185 and SEQ ID NO: 249, respectively. In an aspect, the first gRNA molecule and the second gRNA molecule include targeting domains comprising, e.g., consisting of, SEQ ID NO: 185 and SEQ ID NO: 244, respectively. In an aspect, the first gRNA molecule and the second gRNA molecule include targeting domains comprising, e.g., consisting of, SEQ ID NO: 185 and SEQ ID NO: 199, respectively. In an aspect, the first gRNA molecule and the second gRNA molecule include targeting domains comprising, e.g., consisting of, SEQ ID NO: 185 and SEQ ID NO: 251, respectively. In an aspect, the first gRNA molecule and the second gRNA molecule include targeting domains comprising, e.g., consisting of, SEQ ID NO: 185 and SEQ ID NO: 250, respectively. In an aspect, the first gRNA molecule and the second gRNA molecule include targeting domains comprising, e.g., consisting of, SEQ ID NO: 185 and SEQ ID NO: 334, respectively. In an aspect, the first gRNA molecule and the second gRNA molecule include targeting domains comprising, e.g., consisting of, SEQ ID NO: 185 and SEQ ID NO: 186, respectively. In an aspect, the first gRNA molecule and the second gRNA molecule include targeting domains comprising, e.g., consisting of, SEQ ID NO: 185 and SEQ ID NO: 336, respectively. In an aspect, the first gRNA molecule and the second gRNA molecule include targeting domains comprising, e.g., consisting of, SEQ ID NO: 185 and SEQ ID NO: 337, respectively. In an aspect, the first gRNA molecule and the second gRNA molecule include targeting domains comprising, e.g., consisting of, SEQ ID NO: 186 and SEQ ID NO: 244, respectively. In an aspect, the first gRNA molecule and the second gRNA molecule include targeting domains comprising, e.g., consisting of, SEQ ID NO: 186 and SEQ ID NO: 199, respectively. In an aspect, the first gRNA molecule and the second gRNA molecule include targeting domains comprising, e.g., consisting of, SEQ ID NO: 186 and SEQ ID NO: 251, respectively. In an aspect, the first gRNA molecule and the second gRNA molecule include targeting domains comprising, e.g., consisting of, SEQ ID NO: 186 and SEQ ID NO: 250, respectively. In an aspect, the first gRNA molecule and the second gRNA molecule include targeting domains comprising, e.g., consisting of, SEQ ID NO: 186 and SEQ ID NO: 334, respectively. In an aspect, the first gRNA molecule and the second gRNA molecule include targeting domains comprising, e.g., consisting of, SEQ ID NO: 186 and SEQ ID NO: 185, respectively. In an aspect, the first gRNA molecule and the second gRNA molecule include targeting domains comprising, e.g., consisting of, SEQ ID NO: 186 and SEQ ID NO: 336, respectively. In an aspect, the first gRNA molecule and the second gRNA molecule include targeting domains comprising, e.g., consisting of, SEQ ID NO: 186 and SEQ ID NO: 337, respectively. In an aspect, the first gRNA molecule and the second gRNA molecule include targeting domains comprising, e.g., consisting of, SEQ ID NO: 186 and SEQ ID NO: 246, respectively. In an aspect, the first gRNA molecule and the second gRNA molecule include targeting domains comprising, e.g., consisting of, SEQ ID NO: 186 and SEQ ID NO: 248, respectively. In an aspect, the first gRNA molecule and the second gRNA molecule include targeting domains comprising, e.g., consisting of, SEQ ID NO: 186 and SEQ ID NO: 247, respectively. In an aspect, the first gRNA molecule and the second gRNA molecule include targeting domains comprising, e.g., consisting of, SEQ ID NO: 186 and SEQ ID NO: 245, respectively. In an aspect, the first gRNA molecule and the second gRNA molecule include targeting domains comprising, e.g., consisting of, SEQ ID NO: 186 and SEQ ID NO: 249, respectively. In an aspect, the first gRNA molecule and the second gRNA molecule include targeting domains comprising, e.g., consisting of, SEQ ID NO: 186 and SEQ ID NO: 244, respectively. In an aspect, the first gRNA molecule and the second gRNA molecule include targeting domains comprising, e.g., consisting of, SEQ ID NO: 186 and SEQ ID NO: 199, respectively. In an aspect, the first gRNA molecule and the second gRNA molecule include targeting domains comprising, e.g., consisting of, SEQ ID NO: 186 and SEQ ID NO: 251, respectively. In an aspect, the first gRNA molecule and the second gRNA molecule include targeting domains comprising, e.g., consisting of, SEQ ID NO: 186 and SEQ ID NO: 250, respectively. In an aspect, the first gRNA molecule and the second gRNA molecule include targeting domains comprising, e.g., consisting of, SEQ ID NO: 186 and SEQ ID NO: 334, respectively. In an aspect, the first gRNA molecule and the second gRNA molecule include targeting domains comprising, e.g., consisting of, SEQ ID NO: 186 and SEQ ID NO: 185, respectively. In an aspect, the first gRNA molecule and the second gRNA molecule include targeting domains comprising, e.g., consisting of, SEQ ID NO: 186 and SEQ ID NO: 336, respectively. In an aspect, the first gRNA molecule and the second gRNA molecule include targeting domains comprising, e.g., consisting of, SEQ ID NO: 186 and SEQ ID NO: 337, respectively. In an aspect, the first gRNA molecule and the second gRNA molecule include targeting domains comprising, e.g., consisting of, SEQ ID NO: 336 and SEQ ID NO: 244, respectively. In an aspect, the first gRNA molecule and the second gRNA molecule include targeting domains comprising, e.g., consisting of, SEQ ID NO: 336 and SEQ ID NO: 199, respectively. In an aspect, the first gRNA molecule and the second gRNA molecule include targeting domains comprising, e.g., consisting of, SEQ ID NO: 336 and SEQ ID NO: 251, respectively. In an aspect, the first gRNA molecule and the second gRNA molecule include targeting domains comprising, e.g., consisting of, SEQ ID NO: 336 and SEQ ID NO: 250, respectively. In an aspect, the first gRNA molecule and the second gRNA molecule include targeting domains comprising, e.g., consisting of, SEQ ID NO: 336 and SEQ ID NO: 334, respectively. In an aspect, the first gRNA molecule and the second gRNA molecule include targeting domains comprising, e.g., consisting of, SEQ ID NO: 336 and SEQ ID NO: 185, respectively. In an aspect, the first gRNA molecule and the second gRNA molecule include targeting domains comprising, e.g., consisting of, SEQ ID NO: 336 and SEQ ID NO: 186, respectively. In an aspect, the first gRNA molecule and the second gRNA molecule include targeting domains comprising, e.g., consisting of, SEQ ID NO: 336 and SEQ ID NO: 337, respectively. In an aspect, the first gRNA molecule and the second gRNA molecule include targeting domains comprising, e.g., consisting of, SEQ ID NO: 336 and SEQ ID NO: 246, respectively. In an aspect, the first gRNA molecule and the second gRNA molecule include targeting domains comprising, e.g., consisting of, SEQ ID NO: 336 and SEQ ID NO: 248, respectively. In an aspect, the first gRNA molecule and the second gRNA molecule include targeting domains comprising, e.g., consisting of, SEQ ID NO: 336 and SEQ ID NO: 247, respectively. In an aspect, the first gRNA molecule and the second gRNA molecule include targeting domains comprising, e.g., consisting of, SEQ ID NO: 336 and SEQ ID NO: 245, respectively. In an aspect, the first gRNA molecule and the second gRNA molecule include targeting domains comprising, e.g., consisting of, SEQ ID NO: 336 and SEQ ID NO: 249, respectively. In an aspect, the first gRNA molecule and the second gRNA molecule include targeting domains comprising, e.g., consisting of, SEQ ID NO: 336 and SEQ ID NO: 244, respectively. In an aspect, the first gRNA molecule and the second gRNA molecule include targeting domains comprising, e.g., consisting of, SEQ ID NO: 336 and SEQ ID NO: 199, respectively. In an aspect, the first gRNA molecule and the second gRNA molecule include targeting domains comprising, e.g., consisting of, SEQ ID NO: 336 and SEQ ID NO: 251, respectively. In an aspect, the first gRNA molecule and the second gRNA molecule include targeting domains comprising, e.g., consisting of, SEQ ID NO: 336 and SEQ ID NO: 250, respectively. In an aspect, the first gRNA molecule and the second gRNA molecule include targeting domains comprising, e.g., consisting of, SEQ ID NO: 336 and SEQ ID NO: 334, respectively. In an aspect, the first gRNA molecule and the second gRNA molecule include targeting domains comprising, e.g., consisting of, SEQ ID NO: 336 and SEQ ID NO: 185, respectively. In an aspect, the first gRNA molecule and the second gRNA molecule include targeting domains comprising, e.g., consisting of, SEQ ID NO: 336 and SEQ ID NO: 186, respectively. In an aspect, the first gRNA molecule and the second gRNA molecule include targeting domains comprising, e.g., consisting of, SEQ ID NO: 336 and SEQ ID NO: 337, respectively. In an aspect, the first gRNA molecule and the second gRNA molecule include targeting domains comprising, e.g., consisting of, SEQ ID NO: 337 and SEQ ID NO: 244, respectively. In an aspect, the first gRNA molecule and the second gRNA molecule include targeting domains comprising, e.g., consisting of, SEQ ID NO: 337 and SEQ ID NO: 199, respectively. In an aspect, the first gRNA molecule and the second gRNA molecule include targeting domains comprising, e.g., consisting of, SEQ ID NO: 337 and SEQ ID NO: 251, respectively. In an aspect, the first gRNA molecule and the second gRNA molecule include targeting domains comprising, e.g., consisting of, SEQ ID NO: 337 and SEQ ID NO: 250, respectively. In an aspect, the first gRNA molecule and the second gRNA molecule include targeting domains comprising, e.g., consisting of, SEQ ID NO: 337 and SEQ ID NO: 334, respectively. In an aspect, the first gRNA molecule and the second gRNA molecule include targeting domains comprising, e.g., consisting of, SEQ ID NO: 337 and SEQ ID NO: 185, respectively. In an aspect, the first gRNA molecule and the second gRNA molecule include targeting domains comprising, e.g., consisting of, SEQ ID NO: 337 and SEQ ID NO: 186, respectively. In an aspect, the first gRNA molecule and the second gRNA molecule include targeting domains comprising, e.g., consisting of, SEQ ID NO: 337 and SEQ ID NO: 336, respectively. In an aspect, the first gRNA molecule and the second gRNA molecule include targeting domains comprising, e.g., consisting of, SEQ ID NO: 337 and SEQ ID NO: 246, respectively. In an aspect, the first gRNA molecule and the second gRNA molecule include targeting domains comprising, e.g., consisting of, SEQ ID NO: 337 and SEQ ID NO: 248, respectively. In an aspect, the first gRNA molecule and the second gRNA molecule include targeting domains comprising, e.g., consisting of, SEQ ID NO: 337 and SEQ ID NO: 247, respectively. In an aspect, the first gRNA molecule and the second gRNA molecule include targeting domains comprising, e.g., consisting of, SEQ ID NO: 337 and SEQ ID NO: 245, respectively. In an aspect, the first gRNA molecule and the second gRNA molecule include targeting domains comprising, e.g., consisting of, SEQ ID NO: 337 and SEQ ID NO: 249, respectively. In an aspect, the first gRNA molecule and the second gRNA molecule include targeting domains comprising, e.g., consisting of, SEQ ID NO: 337 and SEQ ID NO: 244, respectively. In an aspect, the first gRNA molecule and the second gRNA molecule include targeting domains comprising, e.g., consisting of, SEQ ID NO: 337 and SEQ ID NO: 199, respectively. In an aspect, the first gRNA molecule and the second gRNA molecule include targeting domains comprising, e.g., consisting of, SEQ ID NO: 337 and SEQ ID NO: 251, respectively. In an aspect, the first gRNA molecule and the second gRNA molecule include targeting domains comprising, e.g., consisting of, SEQ ID NO: 337 and SEQ ID NO: 250, respectively. In an aspect, the first gRNA molecule and the second gRNA molecule include targeting domains comprising, e.g., consisting of, SEQ ID NO: 337 and SEQ ID NO: 334, respectively. In an aspect, the first gRNA molecule and the second gRNA molecule include targeting domains comprising, e.g., consisting of, SEQ ID NO: 337 and SEQ ID NO: 185, respectively. In an aspect, the first gRNA molecule and the second gRNA molecule include targeting domains comprising, e.g., consisting of, SEQ ID NO: 337 and SEQ ID NO: 186, respectively. In an aspect, the first gRNA molecule and the second gRNA molecule include targeting domains comprising, e.g., consisting of, SEQ ID NO: 337 and SEQ ID NO: 336, respectively.

[0358] In embodiments, the aspects of the invention relate to or incorporate a gRNA molecule that is complementary to a target sequence within the +58 enhancer region of the BCL11a gene which is disposed 3′ to the GATA-1 binding site, e.g., 3′ to the GATA1 binding site and TAL-1 binding site. In embodiments, the CRISPR system comprising a gRNA molecule described herein induces one or more indels at or near the target site. In embodiments, the indel does not comprise a nucleotide of a GATA-1 binding site and/or does not comprise a nucleotide of a TAL-1 binding site. In embodiments, the CRISPR system induces one or more frameshift indels at or near the target site, e.g., at an overall frameshift indel rate of at least about 10%, at least about 20%, at least about 30%, at least about 40%, or at least about 50%, e.g., as measured by NGS. In embodiments, the overall indel rate is at least about 70%, at least about 80%, at least about 90%, or at least about 95%, e.g., as measured by NGS.

TABLE 8
Preferred Guide RNA Targeting Domains directed to the +62 Enhancer
Region of the BCL11a Gene (i.e., to a BCL11a Enhancer)

| | Exon/ | | | | SEQ ID |
|---|---|---|---|---|---|
| Id. | Feature | Strand | Targeting domain | Locations | NO: |
| CR00171 | 62 | − | AGCUCUGGAAUGAUGGCUUA | Chr2: 60490354-60490376 | 278 |
| CR00172 | 62 | − | AUUGUGGAGCUCUGGAAUGA | Chr2: 60490361-60490383 | 279 |
| CR00173 | 62 | − | CUGGAAUAGAAAAUUGGAGU | Chr2: 60490384-60490406 | 280 |
| CR00174 | 62 | − | UGGGUACGGGGAACUAAGAC | Chr2: 60490403-60490425 | 281 |
| CR00175 | 62 | + | UUAGUUCCCCGUACCCAUCA | Chr2: 60490409-60490431 | 282 |
| CR00176 | 62 | − | UAUUUUCCUUGAUGGGUACG | Chr2: 60490415-60490437 | 283 |
| CR00177 | 62 | − | AUAUUUUCCUUGAUGGGUAC | Chr2: 60490416-60490438 | 284 |
| CR00178 | 62 | − | AAUAUUUUCCUUGAUGGGUA | Chr2: 60490417-60490439 | 285 |
| CR00179 | 62 | − | GGAAGGAAAUGAGAACGGAA | Chr2: 60490456-60490478 | 286 |
| CR00180 | 62 | − | AGGAAGGAAAUGAGAACGGA | Chr2: 60490457-60490479 | 287 |
| CR00181 | 62 | + | AUACUUCAAGGCCUCAAUGA | Chr2: 60490520-60490542 | 288 |
| CR00182 | 62 | − | GACUAGGUAGACCUUCAUUG | Chr2: 60490531-60490553 | 289 |
| CR00183 | 62 | − | UUCUUCUUGCUAAGGUGACU | Chr2: 60490547-60490569 | 290 |
| CR00184 | 62 | − | GAGAUUGAUUCUUCUUGCUA | Chr2: 60490555-60490577 | 291 |
| CR00185 | 62 | − | GUGUUCUAUGAGGUUGGAGA | Chr2: 60490580-60490602 | 292 |
| CR00186 | 62 | − | GGAUGAGUGUUCUAUGAGGU | Chr2: 60490586-60490608 | 293 |
| CR00187 | 62 | − | CAUGGGAUGAGUGUUCUAUG | Chr2: 60490590-60490612 | 294 |
| CR00188 | 62 | − | UGAGUCAGGGAGUGGUGCAU | Chr2: 60490607-60490629 | 295 |
| CR00189 | 62 | − | AUGAGUCAGGGAGUGGUGCA | Chr2: 60490608-60490630 | 296 |
| CR00190 | 62 | + | CCACUCCCUGACUCAUAUCU | Chr2: 60490615-60490637 | 297 |
| CR00191 | 62 | − | UAAGGCCUAGAUAUGAGUCA | Chr2: 60490620-60490642 | 298 |
| CR00192 | 62 | − | GUAAGGCCUAGAUAUGAGUC | Chr2: 60490621-60490643 | 299 |
| CR00193 | 62 | + | AUAUCUAGGCCUUACAUUGC | Chr2: 60490629-60490651 | 300 |
| CR00194 | 62 | − | AAAUUAAUUAGAGGCAUAGA | Chr2: 60490656-60490678 | 301 |
| CR00195 | 62 | − | GAAAUUAAUUAGAGGCAUAG | Chr2: 60490657-60490679 | 302 |
| CR00196 | 62 | − | GAACACAUGAAAUUAAUUAG | Chr2: 60490665-60490687 | 303 |
| CR00197 | 62 | + | CCAAUGAGUUUCUUCAAUAC | Chr2: 60490688-60490710 | 304 |
| CR00198 | 62 | − | CAAAUAUAAUAGAAGCAAGU | Chr2: 60490721-60490743 | 305 |
| CR00199 | 62 | − | AAAUAACUUCCCUUUUAGGA | Chr2: 60490821-60490843 | 306 |
| CR00200 | 62 | − | GGAAAAAUAACUUCCCUUUU | Chr2: 60490825-60490847 | 307 |
| CR00201 | 62 | − | UUUUGAACAGAAAUGAUAUU | Chr2: 60490846-60490868 | 308 |
| CR00202 | 62 | − | AGUUCAAGUAGAUAUCAGAA | Chr2: 60490905-60490927 | 309 |
| CR00203 | 62 | − | AAGUUCAAGUAGAUAUCAGA | Chr2: 60490906-60490928 | 310 |
| CR00204 | 62 | − | GGGUGGCUGUUUAAAGAGGG | Chr2: 60490994-60491016 | 311 |
| CR00205 | 62 | − | GUGGGGUGGCUGUUUAAAGA | Chr2: 60490997-60491019 | 312 |
| CR00206 | 62 | − | UGUGGGGUGGCUGUUUAAAG | Chr2: 60490998-60491020 | 313 |
| CR00207 | 62 | + | UGCCAACCAGACUGUGCGCC | Chr2: 60491051-60491073 | 314 |
| CR00208 | 62 | − | AACCUGGCGCACAGUCUGGU | Chr2: 60491053-60491075 | 315 |
| CR00209 | 62 | + | AACCAGACUGUGCGCCAGGU | Chr2: 60491055-60491077 | 316 |
| CR00210 | 62 | − | UACCAACCUGGCGCACAGUC | Chr2: 60491057-60491079 | 317 |
| CR00211 | 62 | − | UCUGUCAGACUUUACCAACC | Chr2: 60491069-60491091 | 318 |
| CR00212 | 62 | + | AUAUGUGAAGCCCAACUACG | Chr2: 60491118-60491140 | 319 |
| CR00213 | 62 | − | AGUUGCACAACCACGUAGUU | Chr2: 60491128-60491150 | 320 |
| CR00214 | 62 | − | GAGUUGCACAACCACGUAGU | Chr2: 60491129-60491151 | 321 |
| CR00215 | 62 | + | CUAUAGCUGACUUUCAACCA | Chr2: 60491151-60491173 | 322 |
| CR00216 | 62 | − | AACUUCUUUGCAGAUGACCA | Chr2: 60491168-60491190 | 323 |
| CR00217 | 62 | − | UUGCAUUGAGGAUGCGCAGG | Chr2: 60491199-60491221 | 324 |
| CR00218 | 62 | − | UUUUUGCAUUGAGGAUGCGC | Chr2: 60491202-60491224 | 325 |
| CR00221 | 62 | + | GACCUCAUUUUGAUGCCAGA | Chr2: 60491281-60491303 | 326 |
| CR00222 | 62 | − | UGCCCUCUGGCAUCAAAAUG | Chr2: 60491283-60491305 | 327 |
| CR00223 | 62 | + | AUGCCAGAGGGCAGCAAACA | Chr2: 60491293-60491315 | 328 |
| CR00224 | 62 | − | CUGUACUUAAUAGCUGAAGG | Chr2: 60491326-60491348 | 329 |
| CR00225 | 62 | − | ACUGUACUUAAUAGCUGAAG | Chr2: 60491327-60491349 | 330 |
| CR00227 | 62 | + | CAGCUAUUAAGUACAGUAAA | Chr2: 60491333-60491355 | 331 |
| CR00228 | 62 | − | GAGCAUUUCAAAUGAUAGUU | Chr2: 60491360-60491382 | 332 |
| CR00229 | 62 | + | CAUUUGAAAUGCUCCCGGCC | Chr2: 60491369-60491391 | 333 |

[0359] In some aspects of the invention, it is preferred that the gRNA molecule to the +62 Enhancer region of BCL11a comprise a targeting domain of a gRNA listed in FIG. 12. In an aspect, the gRNA molecule includes a targeting domain comprising, e.g., consisting of, SEQ ID NO: 318. In an aspect, the gRNA molecule includes a targeting domain comprising, e.g., consisting of, SEQ ID NO: 312. In an aspect, the gRNA molecule includes a targeting domain comprising, e.g., consisting of, SEQ ID NO: 313. In an aspect, the gRNA molecule includes a targeting domain comprising, e.g., consisting of, SEQ ID NO: 294. In an aspect, the gRNA molecule includes a targeting domain comprising, e.g., consisting of, SEQ ID NO: 310. In an aspect, the gRNA molecule includes a targeting domain comprising, e.g., consisting of, SEQ ID NO: 319. In an aspect, the gRNA molecule includes a targeting domain comprising, e.g., consisting of, SEQ ID NO: 298. In an aspect, the gRNA molecule includes a targeting domain comprising, e.g., consisting of, SEQ ID NO: 322. In an aspect, the gRNA molecule includes a targeting domain comprising, e.g., consisting of, SEQ ID NO: 311. In an aspect, the gRNA molecule includes a targeting domain comprising, e.g., consisting of, SEQ ID NO: 315. In an aspect, the gRNA molecule includes a targeting domain comprising, e.g., consisting of, SEQ ID NO: 290. In an aspect, the gRNA molecule includes a targeting domain comprising, e.g., consisting of, SEQ ID NO: 317. In an aspect, the gRNA molecule includes a targeting domain comprising, e.g., consisting of, SEQ ID NO: 309. In an aspect, the gRNA molecule includes a targeting domain comprising, e.g., consisting of, SEQ ID NO: 289. In an aspect, the gRNA molecule includes a targeting domain comprising, e.g., consisting of, SEQ ID NO: 281.

[0360] In some aspects of the invention, e.g., as indicated herein, it may be beneficial to include gRNA moleucles targeting more than one, e.g., two, target sites (e.g., a first gRNA molecule and a second gRNA molecule). In some embodiments, the two target sites are both located in the +62 BCL11a enhancer region. In such aspects, any combination of more than one, e.g., two, gRNA molecules (e.g., a first gRNA molecule and a second gRNA molecule) comprising targeting domains listed in Table 8 may be used. In an aspect, the first gRNA molecule and the second gRNA molecule include targeting domains comprising, e.g., consisting of, SEQ ID NO: 318 and SEQ ID NO: 312, respectively. In an aspect, the first gRNA molecule and the second gRNA molecule include targeting domains comprising, e.g., consisting of, SEQ ID NO: 318 and SEQ ID NO: 313, respectively. In an aspect, the first gRNA molecule and the second gRNA molecule include targeting domains comprising, e.g., consisting of, SEQ ID NO: 318 and SEQ ID NO: 294, respectively. In an aspect, the first gRNA molecule and the second gRNA molecule include targeting domains comprising, e.g., consisting of, SEQ ID NO: 318 and SEQ ID NO: 310, respectively. In an aspect, the first gRNA molecule and the second gRNA molecule include targeting domains comprising, e.g., consisting of, SEQ ID NO: 318 and SEQ ID NO: 319, respectively. In an aspect, the first gRNA molecule and the second gRNA molecule include targeting domains comprising, e.g., consisting of, SEQ ID NO: 318 and SEQ ID NO: 298, respectively. In an aspect, the first gRNA molecule and the second gRNA molecule include targeting domains comprising, e.g., consisting of, SEQ ID NO: 318 and SEQ ID NO: 322, respectively. In an aspect, the first gRNA molecule and the second gRNA molecule include targeting domains comprising, e.g., consisting of, SEQ ID NO: 318 and SEQ ID NO: 311, respectively. In an aspect, the first gRNA molecule and the second gRNA molecule include targeting domains comprising, e.g., consisting of, SEQ ID NO: 318 and SEQ ID NO: 315, respectively. In an aspect, the first gRNA molecule and the second gRNA molecule include targeting domains comprising, e.g., consisting of, SEQ ID NO: 318 and SEQ ID NO: 290, respectively. In an aspect, the first gRNA molecule and the second gRNA molecule include targeting domains comprising, e.g., consisting of, SEQ ID NO: 318 and SEQ ID NO: 317, respectively. In an aspect, the first gRNA molecule and the second gRNA molecule include targeting domains comprising, e.g., consisting of, SEQ ID NO: 318 and SEQ ID NO: 309, respectively. In an aspect, the first gRNA molecule and the second gRNA molecule include targeting domains comprising, e.g., consisting of, SEQ ID NO: 318 and SEQ ID NO: 289, respectively. In an aspect, the first gRNA molecule and the second gRNA molecule include targeting domains comprising, e.g., consisting of, SEQ ID NO: 318 and SEQ ID NO: 281, respectively. In an aspect, the first gRNA molecule and the second gRNA molecule include targeting domains comprising, e.g., consisting of, SEQ ID NO: 312 and SEQ ID NO: 313, respectively. In an aspect, the first gRNA molecule and the second gRNA molecule include targeting domains comprising, e.g., consisting of, SEQ ID NO: 312 and SEQ ID NO: 294, respectively. In an aspect, the first gRNA molecule and the second gRNA molecule include targeting domains comprising, e.g., consisting of, SEQ ID NO: 312 and SEQ ID NO: 310, respectively. In an aspect, the first gRNA molecule and the second gRNA molecule include targeting domains comprising, e.g., consisting of, SEQ ID NO: 312 and SEQ ID NO: 319, respectively. In an aspect, the first gRNA molecule and the second gRNA molecule include targeting domains comprising, e.g., consisting of, SEQ ID NO: 312 and SEQ ID NO: 298, respectively. In an aspect, the first gRNA molecule and the second gRNA molecule include targeting domains comprising, e.g., consisting of, SEQ ID NO: 312 and SEQ ID NO: 322, respectively. In an aspect, the first gRNA molecule and the second gRNA molecule include targeting domains comprising, e.g., consisting of, SEQ ID NO: 312 and SEQ ID NO: 311, respectively. In an aspect, the first gRNA molecule and the second gRNA molecule include targeting domains comprising, e.g., consisting of, SEQ ID NO: 312 and SEQ ID NO: 315, respectively. In an aspect, the first gRNA molecule and the second gRNA molecule include targeting domains comprising, e.g., consisting of, SEQ ID NO: 312 and SEQ ID NO: 290, respectively. In an aspect, the first gRNA molecule and the second gRNA molecule include targeting domains comprising, e.g., consisting of, SEQ ID NO: 312 and SEQ ID NO: 317, respectively. In an aspect, the first gRNA molecule and the second gRNA molecule include targeting domains comprising, e.g., consisting of, SEQ ID NO: 312 and SEQ ID NO: 309, respectively. In an aspect, the first gRNA molecule and the second gRNA molecule include targeting domains comprising, e.g., consisting of, SEQ ID NO: 312 and SEQ ID NO: 289, respectively. In an aspect, the first gRNA molecule and the second gRNA molecule include targeting domains comprising, e.g., consisting of, SEQ ID NO: 312 and SEQ ID NO: 281, respectively. In an aspect, the first gRNA molecule and the second gRNA molecule include targeting domains comprising, e.g., consisting of, SEQ ID NO: 313 and SEQ ID NO: 312, respectively. In an aspect, the first gRNA molecule and the second gRNA molecule include targeting domains comprising, e.g., consisting of, SEQ ID NO: 313 and SEQ ID NO: 294, respectively. In an aspect, the first gRNA molecule and the second gRNA molecule include targeting domains comprising, e.g., consisting of, SEQ ID NO: 313 and SEQ ID NO: 310, respectively. In an aspect, the first gRNA molecule and the second gRNA molecule include targeting domains comprising, e.g., consisting of, SEQ ID NO: 313 and SEQ ID NO: 319, respectively. In an aspect, the first gRNA molecule and the second gRNA molecule include targeting domains comprising, e.g., consisting of, SEQ ID NO: 313 and SEQ ID NO: 298, respectively. In an aspect, the first gRNA molecule and the second gRNA molecule include targeting domains comprising, e.g., consisting of, SEQ ID NO: 313 and SEQ ID NO: 322, respectively. In an aspect, the first gRNA molecule and the second gRNA molecule include targeting domains comprising, e.g., consisting of, SEQ ID NO: 313 and SEQ ID NO: 311, respectively. In an aspect, the first gRNA molecule and the second gRNA molecule include targeting domains comprising, e.g., consisting of, SEQ ID NO: 313 and SEQ ID NO: 315, respectively. In an aspect, the first gRNA molecule and the second gRNA molecule include targeting domains comprising, e.g., consisting of, SEQ ID NO: 313 and SEQ ID NO: 290, respectively. In an aspect, the first gRNA molecule and the second gRNA molecule include targeting domains comprising, e.g., consisting of, SEQ ID NO: 313 and SEQ ID NO: 317, respectively. In an aspect, the first gRNA molecule and the second gRNA molecule include targeting domains comprising, e.g., consisting of, SEQ ID NO: 313 and SEQ ID NO: 309, respectively. In an aspect, the first gRNA molecule and the second gRNA molecule include targeting domains comprising, e.g., consisting of, SEQ ID NO: 313 and SEQ ID NO: 289, respectively. In an aspect, the first gRNA molecule and the second gRNA molecule include targeting domains comprising, e.g., consisting of, SEQ ID NO: 313 and SEQ ID NO: 281, respectively. In an aspect, the first gRNA molecule and the second gRNA molecule include targeting domains comprising, e.g., consisting of, SEQ ID NO: 294 and SEQ ID NO: 312, respectively. In an aspect, the first gRNA molecule and the second gRNA molecule include targeting domains comprising, e.g., consisting of, SEQ ID NO: 294 and SEQ ID NO: 313, respectively. In an aspect, the first gRNA molecule and the second gRNA molecule include targeting domains comprising, e.g., consisting of, SEQ ID NO: 294 and SEQ ID NO: 310, respectively. In an aspect, the first gRNA molecule and the second gRNA molecule include targeting domains comprising, e.g., consisting of, SEQ ID NO: 294 and SEQ ID NO: 319, respectively. In an aspect, the first gRNA molecule and the second gRNA molecule include targeting domains comprising, e.g., consisting of, SEQ ID NO: 294 and SEQ ID NO: 298, respectively. In an aspect, the first gRNA molecule and the second gRNA molecule include targeting domains comprising, e.g., consisting of, SEQ ID NO: 294 and SEQ ID NO: 322, respectively. In an aspect, the first gRNA molecule and the second gRNA molecule include targeting domains comprising, e.g., consisting of, SEQ ID NO: 294 and SEQ ID NO: 311, respectively. In an aspect, the first gRNA molecule and the second gRNA molecule include targeting domains comprising, e.g., consisting of, SEQ ID NO: 294 and SEQ ID NO: 315, respectively. In an aspect, the first gRNA molecule and the second gRNA molecule include targeting domains comprising, e.g., consisting of, SEQ ID NO: 294 and SEQ ID NO: 290, respectively. In an aspect, the first gRNA molecule and the second gRNA molecule include targeting domains comprising, e.g., consisting of, SEQ ID NO: 294 and SEQ ID NO: 317, respectively. In an aspect, the first gRNA molecule and the second gRNA molecule include targeting domains comprising, e.g., consisting of, SEQ ID NO: 294 and SEQ ID NO: 309, respectively. In an aspect, the first gRNA molecule and the second gRNA molecule include targeting domains comprising, e.g., consisting of, SEQ ID NO: 294 and SEQ ID NO: 289, respectively. In an aspect, the first gRNA molecule and the second gRNA molecule include targeting domains comprising, e.g., consisting of, SEQ ID NO: 294 and SEQ ID NO: 281, respectively. In an aspect, the first gRNA molecule and the second gRNA molecule include targeting domains comprising, e.g., consisting of, SEQ ID NO: 310 and SEQ ID NO: 312, respectively. In an aspect, the first gRNA molecule and the second gRNA molecule include targeting domains comprising, e.g., consisting of, SEQ ID NO: 310 and SEQ ID NO: 313, respectively. In an aspect, the first gRNA molecule and the second gRNA molecule include targeting domains comprising, e.g., consisting of, SEQ ID NO: 310 and SEQ ID NO: 294, respectively. In an aspect, the first gRNA molecule and the second gRNA molecule include targeting domains comprising, e.g., consisting of, SEQ ID NO: 310 and SEQ ID NO: 319, respectively. In an aspect, the first gRNA molecule and the second gRNA molecule include targeting domains comprising, e.g., consisting of, SEQ ID NO: 310 and SEQ ID NO: 298, respectively. In an aspect, the first gRNA molecule and the second gRNA molecule include targeting domains comprising, e.g., consisting of, SEQ ID NO: 310 and SEQ ID NO: 322, respectively. In an aspect, the first gRNA molecule and the second gRNA molecule include targeting domains comprising, e.g., consisting of, SEQ ID NO: 310 and SEQ ID NO: 311, respectively. In an aspect, the first gRNA molecule and the second gRNA molecule include targeting domains comprising, e.g., consisting of, SEQ ID NO: 310 and SEQ ID NO: 315, respectively. In an aspect, the first gRNA molecule and the second gRNA molecule include targeting domains comprising, e.g., consisting of, SEQ ID NO: 310 and SEQ ID NO: 290, respectively. In an aspect, the first gRNA molecule and the second gRNA molecule include targeting domains comprising, e.g., consisting of, SEQ ID NO: 310 and SEQ ID NO: 317, respectively. In an aspect, the first gRNA molecule and the second gRNA molecule include targeting domains comprising, e.g., consisting of, SEQ ID NO: 310 and SEQ ID NO: 309, respectively. In an aspect, the first gRNA molecule and the second gRNA molecule include targeting domains comprising, e.g., consisting of, SEQ ID NO: 310 and SEQ ID NO: 289, respectively. In an aspect, the first gRNA molecule and the second gRNA molecule include targeting domains comprising, e.g., consisting of, SEQ ID NO: 310 and SEQ ID NO: 281, respectively. In an aspect, the first gRNA molecule and the second gRNA molecule include targeting domains comprising, e.g., consisting of, SEQ ID NO: 319 and SEQ ID NO: 312, respectively. In an aspect, the first gRNA molecule and the second gRNA molecule include targeting domains comprising, e.g., consisting of, SEQ ID NO: 319 and SEQ ID NO: 313, respectively. In an aspect, the first gRNA molecule and the second gRNA molecule include targeting domains comprising, e.g., consisting of, SEQ ID NO: 319 and SEQ ID NO: 294, respectively. In an aspect, the first gRNA molecule and the second gRNA molecule include targeting domains comprising, e.g., consisting of, SEQ ID NO: 319 and SEQ ID NO: 310, respectively. In an aspect, the first gRNA molecule and the second gRNA molecule include targeting domains comprising, e.g., consisting of, SEQ ID NO: 319 and SEQ ID NO: 298, respectively. In an aspect, the first gRNA molecule and the second gRNA molecule include targeting domains comprising, e.g., consisting of, SEQ ID NO: 319 and SEQ ID NO: 322, respectively. In an aspect, the first gRNA molecule and the second gRNA molecule include targeting domains comprising, e.g., consisting of, SEQ ID NO: 319 and SEQ ID NO: 311, respectively. In an aspect, the first gRNA molecule and the second gRNA molecule include targeting domains comprising, e.g., consisting of, SEQ ID NO: 319 and SEQ ID NO: 315, respectively. In an aspect, the first gRNA molecule and the second gRNA molecule include targeting domains comprising, e.g., consisting of, SEQ ID NO: 319 and SEQ ID NO: 290, respectively. In an aspect, the first gRNA molecule and the second gRNA molecule include targeting domains comprising, e.g., consisting of, SEQ ID NO: 319 and SEQ ID NO: 317, respectively. In an aspect, the first gRNA molecule and the second gRNA molecule include targeting domains comprising, e.g., consisting of, SEQ ID NO: 319 and SEQ ID NO: 309, respectively. In an aspect, the first gRNA molecule and the second gRNA molecule include targeting domains comprising, e.g., consisting of, SEQ ID NO: 319 and SEQ ID NO: 289, respectively. In an aspect, the first gRNA molecule and the second gRNA molecule include targeting domains comprising, e.g., consisting of, SEQ ID NO: 319 and SEQ ID NO: 281, respectively. In an aspect, the first gRNA molecule and the second gRNA molecule include targeting domains comprising, e.g., consisting of, SEQ ID NO: 298 and SEQ ID NO: 312, respectively. In an aspect, the first gRNA molecule and the second gRNA molecule include targeting domains comprising, e.g., consisting of, SEQ ID NO: 298 and SEQ ID NO: 313, respectively. In an aspect, the first gRNA molecule and the second gRNA molecule include targeting domains comprising, e.g., consisting of, SEQ ID NO: 298 and SEQ ID NO: 294, respectively. In an aspect, the first gRNA molecule and the second gRNA molecule include targeting domains comprising, e.g., consisting of, SEQ ID NO: 298 and SEQ ID NO: 310, respectively. In an aspect, the first gRNA molecule and the second gRNA molecule include targeting domains comprising, e.g., consisting of, SEQ ID NO: 298 and SEQ ID NO: 319, respectively. In an aspect, the first gRNA molecule and the second gRNA molecule include targeting domains comprising, e.g., consisting of, SEQ ID NO: 298 and SEQ ID NO: 322, respectively. In an aspect, the first gRNA molecule and the second gRNA molecule include targeting domains comprising, e.g., consisting of, SEQ ID NO: 298 and SEQ ID NO: 311, respectively. In an aspect, the first gRNA molecule and the second gRNA molecule include targeting domains comprising, e.g., consisting of, SEQ ID NO: 298 and SEQ ID NO: 315, respectively. In an aspect, the first gRNA molecule and the second gRNA molecule include targeting domains comprising, e.g., consisting of, SEQ ID NO: 298 and SEQ ID NO: 290, respectively. In an aspect, the first gRNA molecule and the second gRNA molecule include targeting domains comprising, e.g., consisting of, SEQ ID NO: 298 and SEQ ID NO: 317, respectively. In an aspect, the first gRNA molecule and the second gRNA molecule include targeting domains comprising, e.g., consisting of, SEQ ID NO: 298 and SEQ ID NO: 309, respectively. In an aspect, the first gRNA molecule and the second gRNA molecule include targeting domains comprising, e.g., consisting of, SEQ ID NO: 298 and SEQ ID NO: 289, respectively. In an aspect, the first gRNA molecule and the second gRNA molecule include targeting domains comprising, e.g., consisting of, SEQ ID NO: 298 and SEQ ID NO: 281, respectively. In an aspect, the first gRNA molecule and the second gRNA molecule include targeting domains comprising, e.g., consisting of, SEQ ID NO: 322 and SEQ ID NO: 312, respectively. In an aspect, the first gRNA molecule and the second gRNA molecule include targeting domains comprising, e.g., consisting of, SEQ ID NO: 322 and SEQ ID NO: 313, respectively. In an aspect, the first gRNA molecule and the second gRNA molecule include targeting domains comprising, e.g., consisting of, SEQ ID NO: 322 and SEQ ID NO: 294, respectively. In an aspect, the first gRNA molecule and the second gRNA molecule include targeting domains comprising, e.g., consisting of, SEQ ID NO: 322 and SEQ ID NO: 310, respectively. In an aspect, the first gRNA molecule and the second gRNA molecule include targeting domains comprising, e.g., consisting of, SEQ ID NO: 322 and SEQ ID NO: 319, respectively. In an aspect, the first gRNA molecule and the second gRNA molecule include targeting domains comprising, e.g., consisting of, SEQ ID NO: 322 and SEQ ID NO: 298, respectively. In an aspect, the first gRNA molecule and the second gRNA molecule include targeting domains comprising, e.g., consisting of, SEQ ID NO: 322 and SEQ ID NO: 311, respectively. In an aspect, the first gRNA molecule and the second gRNA molecule include targeting domains comprising, e.g., consisting of, SEQ ID NO: 322 and SEQ ID NO: 315, respectively. In an aspect, the first gRNA molecule and the second gRNA molecule include targeting domains comprising, e.g., consisting of, SEQ ID NO: 322 and SEQ ID NO: 290, respectively. In an aspect, the first gRNA molecule and the second gRNA molecule include targeting domains comprising, e.g., consisting of, SEQ ID NO: 322 and SEQ ID NO: 317, respectively. In an aspect, the first gRNA molecule and the second gRNA molecule include targeting domains comprising, e.g., consisting of, SEQ ID NO: 322 and SEQ ID NO: 309, respectively. In an aspect, the first gRNA molecule and the second gRNA molecule include targeting domains comprising, e.g., consisting of, SEQ ID NO: 322 and SEQ ID NO: 289, respectively. In an aspect, the first gRNA molecule and the second gRNA molecule include targeting domains comprising, e.g., consisting of, SEQ ID NO: 322 and SEQ ID NO: 281, respectively. In an aspect, the first gRNA molecule and the second gRNA molecule include targeting domains comprising, e.g., consisting of, SEQ ID NO: 311 and SEQ ID NO: 312, respectively. In an aspect, the first gRNA molecule and the second gRNA molecule include targeting domains comprising, e.g., consisting of, SEQ ID NO: 311 and SEQ ID NO: 313, respectively. In an aspect, the first gRNA molecule and the second gRNA molecule include targeting domains comprising, e.g., consisting of, SEQ ID NO: 311 and SEQ ID NO: 294, respectively. In an aspect, the first gRNA molecule and the second gRNA molecule include targeting domains comprising, e.g., consisting of, SEQ ID NO: 311 and SEQ ID NO: 310, respectively. In an aspect, the first gRNA molecule and the second gRNA molecule include targeting domains comprising, e.g., consisting of, SEQ ID NO: 311 and SEQ ID NO: 319, respectively. In an aspect, the first gRNA molecule and the second gRNA molecule include targeting domains comprising, e.g., consisting of, SEQ ID NO: 311 and SEQ ID NO: 298, respectively. In an aspect, the first gRNA molecule and the second gRNA molecule include targeting domains comprising, e.g., consisting of, SEQ ID NO: 311 and SEQ ID NO: 322, respectively. In an aspect, the first gRNA molecule and the second gRNA molecule include targeting domains comprising, e.g., consisting of, SEQ ID NO: 311 and SEQ ID NO: 315, respectively. In an aspect, the first gRNA molecule and the second gRNA molecule include targeting domains comprising, e.g., consisting of, SEQ ID NO: 311 and SEQ ID NO: 290, respectively. In an aspect, the first gRNA molecule and the second gRNA molecule include targeting domains comprising, e.g., consisting of, SEQ ID NO: 311 and SEQ ID NO: 317, respectively. In an aspect, the first gRNA molecule and the second gRNA molecule include targeting domains comprising, e.g., consisting of, SEQ ID NO: 311 and SEQ ID NO: 309, respectively. In an aspect, the first gRNA molecule and the second gRNA molecule include targeting domains comprising, e.g., consisting of, SEQ ID NO: 311 and SEQ ID NO: 289, respectively. In an aspect, the first gRNA molecule and the second gRNA molecule include targeting domains comprising, e.g., consisting of, SEQ ID NO: 311 and SEQ ID NO: 281, respectively. In an aspect, the first gRNA molecule and the second gRNA molecule include targeting domains comprising, e.g., consisting of, SEQ ID NO: 315 and SEQ ID NO: 312, respectively. In an aspect, the first gRNA molecule and the second gRNA molecule include targeting domains comprising, e.g., consisting of, SEQ ID NO: 315 and SEQ ID NO: 313, respectively. In an aspect, the first gRNA molecule and the second gRNA molecule include targeting domains comprising, e.g., consisting of, SEQ ID NO: 315 and SEQ ID NO: 294, respectively. In an aspect, the first gRNA molecule and the second gRNA molecule include targeting domains comprising, e.g., consisting of, SEQ ID NO: 315 and SEQ ID NO: 310, respectively. In an aspect, the first gRNA molecule and the second gRNA molecule include targeting domains comprising, e.g., consisting of, SEQ ID NO: 315 and SEQ ID NO: 319, respectively. In an aspect, the first gRNA molecule and the second gRNA molecule include targeting domains comprising, e.g., consisting of, SEQ ID NO: 315 and SEQ ID NO: 298, respectively. In an aspect, the first gRNA molecule and the second gRNA molecule include targeting domains comprising, e.g., consisting of, SEQ ID NO: 315 and SEQ ID NO: 322, respectively. In an aspect, the first gRNA molecule and the second gRNA molecule include targeting domains comprising, e.g., consisting of, SEQ ID NO: 315 and SEQ ID NO: 311, respectively. In an aspect, the first gRNA molecule and the second gRNA molecule include targeting domains comprising, e.g., consisting of, SEQ ID NO: 315 and SEQ ID NO: 290, respectively. In an aspect, the first gRNA molecule and the second gRNA molecule include targeting domains comprising, e.g., consisting of, SEQ ID NO: 315 and SEQ ID NO: 317, respectively. In an aspect, the first gRNA molecule and the second gRNA molecule include targeting domains comprising, e.g., consisting of, SEQ ID NO: 315 and SEQ ID NO: 309, respectively. In an aspect, the first gRNA molecule and the second gRNA molecule include targeting domains comprising, e.g., consisting of, SEQ ID NO: 315 and SEQ ID NO: 289, respectively. In an aspect, the first gRNA molecule and the second gRNA molecule include targeting domains comprising, e.g., consisting of, SEQ ID NO: 315 and SEQ ID NO: 281, respectively. In an aspect, the first gRNA molecule and the second gRNA molecule include targeting domains comprising, e.g., consisting of, SEQ ID NO: 290 and SEQ ID NO: 312, respectively. In an aspect, the first gRNA molecule and the second gRNA molecule include targeting domains comprising, e.g., consisting of, SEQ ID NO: 290 and SEQ ID NO: 313, respectively. In an aspect, the first gRNA molecule and the second gRNA molecule include targeting domains comprising, e.g., consisting of, SEQ ID NO: 290 and SEQ ID NO: 294, respectively. In an aspect, the first gRNA molecule and the second gRNA molecule include targeting domains comprising, e.g., consisting of, SEQ ID NO: 290 and SEQ ID NO: 310, respectively. In an aspect, the first gRNA molecule and the second gRNA molecule include targeting domains comprising, e.g., consisting of, SEQ ID NO: 290 and SEQ ID NO: 319, respectively. In an aspect, the first gRNA molecule and the second gRNA molecule include targeting domains comprising, e.g., consisting of, SEQ ID NO: 290 and SEQ ID NO: 298, respectively. In an aspect, the first gRNA molecule and the second gRNA molecule include targeting domains comprising, e.g., consisting of, SEQ ID NO: 290 and SEQ ID NO: 322, respectively. In an aspect, the first gRNA molecule and the second gRNA molecule include targeting domains comprising, e.g., consisting of, SEQ ID NO: 290 and SEQ ID NO: 311, respectively. In an aspect, the first gRNA molecule and the second gRNA molecule include targeting domains comprising, e.g., consisting of, SEQ ID NO: 290 and SEQ ID NO: 315, respectively. In an aspect, the first gRNA molecule and the second gRNA molecule include targeting domains comprising, e.g., consisting of, SEQ ID NO: 290 and SEQ ID NO: 317, respectively. In an aspect, the first gRNA molecule and the second gRNA molecule include targeting domains comprising, e.g., consisting of, SEQ ID NO: 290 and SEQ ID NO: 309, respectively. In an aspect, the first gRNA molecule and the second gRNA molecule include targeting domains comprising, e.g., consisting of, SEQ ID NO: 290 and SEQ ID NO: 289, respectively. In an aspect, the first gRNA molecule and the second gRNA molecule include targeting domains comprising, e.g., consisting of, SEQ ID NO: 290 and SEQ ID NO: 281, respectively. In an aspect, the first gRNA molecule and the second gRNA molecule include targeting domains comprising, e.g., consisting of, SEQ ID NO: 317 and SEQ ID NO: 312, respectively. In an aspect, the first gRNA molecule and the second gRNA molecule include targeting domains comprising, e.g., consisting of, SEQ ID NO: 317 and SEQ ID NO: 313, respectively. In an aspect, the first gRNA molecule and the second gRNA molecule include targeting domains comprising, e.g., consisting of, SEQ ID NO: 317 and SEQ ID NO: 294, respectively. In an aspect, the first gRNA molecule and the second gRNA molecule include targeting domains comprising, e.g., consisting of, SEQ ID NO: 317 and SEQ ID NO: 310, respectively. In an aspect, the first gRNA molecule and the second gRNA molecule include targeting domains comprising, e.g., consisting of, SEQ ID NO: 317 and SEQ ID NO: 319, respectively. In an aspect, the first gRNA molecule and the second gRNA molecule include targeting domains comprising, e.g., consisting of, SEQ ID NO: 317 and SEQ ID NO: 298, respectively. In an aspect, the first gRNA molecule and the second gRNA molecule include targeting domains comprising, e.g., consisting of, SEQ ID NO: 317 and SEQ ID NO: 322, respectively. In an aspect, the first gRNA molecule and the second gRNA molecule include targeting domains comprising, e.g., consisting of, SEQ ID NO: 317 and SEQ ID NO: 311, respectively. In an aspect, the first gRNA molecule and the second gRNA molecule include targeting domains comprising, e.g., consisting of, SEQ ID NO: 317 and SEQ ID NO: 315, respectively. In an aspect, the first gRNA molecule and the second gRNA molecule include targeting domains comprising, e.g., consisting of, SEQ ID NO: 317 and SEQ ID NO: 290, respectively. In an aspect, the first gRNA molecule and the second gRNA molecule include targeting domains comprising, e.g., consisting of, SEQ ID NO: 317 and SEQ ID NO: 309, respectively. In an aspect, the first gRNA molecule and the second gRNA molecule include targeting domains comprising, e.g., consisting of, SEQ ID NO: 317 and SEQ ID NO: 289, respectively. In an aspect, the first gRNA molecule and the second gRNA molecule include targeting domains comprising, e.g., consisting of, SEQ ID NO: 317 and SEQ ID NO: 281, respectively. In an aspect, the first gRNA molecule and the second gRNA molecule include targeting domains comprising, e.g., consisting of, SEQ ID NO: 309 and SEQ ID NO: 312, respectively. In an aspect, the first gRNA molecule and the second gRNA molecule include targeting domains comprising, e.g., consisting of, SEQ ID NO: 309 and SEQ ID NO: 313, respectively. In an aspect, the first gRNA molecule and the second gRNA molecule include targeting domains comprising, e.g., consisting of, SEQ ID NO: 309 and SEQ ID NO: 294, respectively. In an aspect, the first gRNA molecule and the second gRNA molecule include targeting domains comprising, e.g., consisting of, SEQ ID NO: 309 and SEQ ID NO: 310, respectively. In an aspect, the first gRNA molecule and the second gRNA molecule include targeting domains comprising, e.g., consisting of, SEQ ID NO: 309 and SEQ ID NO: 319, respectively. In an aspect, the first gRNA molecule and the second gRNA molecule include targeting domains comprising, e.g., consisting of, SEQ ID NO: 309 and SEQ ID NO: 298, respectively. In an aspect, the first gRNA molecule and the second gRNA molecule include targeting domains comprising, e.g., consisting of, SEQ ID NO: 309 and SEQ ID NO: 322, respectively. In an aspect, the first gRNA molecule and the second gRNA molecule include targeting domains comprising, e.g., consisting of, SEQ ID NO: 309 and SEQ ID NO: 311, respectively. In an aspect, the first gRNA molecule and the second gRNA molecule include targeting domains comprising, e.g., consisting of, SEQ ID NO: 309 and SEQ ID NO: 315, respectively. In an aspect, the first gRNA molecule and the second gRNA molecule include targeting domains comprising, e.g., consisting of, SEQ ID NO: 309 and SEQ ID NO: 290, respectively. In an aspect, the first gRNA molecule and the second gRNA molecule include targeting domains comprising, e.g., consisting of, SEQ ID NO: 309 and SEQ ID NO: 317, respectively. In an aspect, the first gRNA molecule and the second gRNA molecule include targeting domains comprising, e.g., consisting of, SEQ ID NO: 309 and SEQ ID NO: 289, respectively. In an aspect, the first gRNA molecule and the second gRNA molecule include targeting domains comprising, e.g., consisting of, SEQ ID NO: 309 and SEQ ID NO: 281, respectively. In an aspect, the first gRNA molecule and the second gRNA molecule include targeting domains comprising, e.g., consisting of, SEQ ID NO: 289 and SEQ ID NO: 312, respectively. In an aspect, the first gRNA molecule and the second gRNA molecule include targeting domains comprising, e.g., consisting of, SEQ ID NO: 289 and SEQ ID NO: 313, respectively. In an aspect, the first gRNA molecule and the second gRNA molecule include targeting domains comprising, e.g., consisting of, SEQ ID NO: 289 and SEQ ID NO: 294, respectively. In an aspect, the first gRNA molecule and the second gRNA molecule include targeting domains comprising, e.g., consisting of, SEQ ID NO: 289 and SEQ ID NO: 310, respectively. In an aspect, the first gRNA molecule and the second gRNA molecule include targeting domains comprising, e.g., consisting of, SEQ ID NO: 289 and SEQ ID NO: 319, respectively. In an aspect, the first gRNA molecule and the second gRNA molecule include targeting domains comprising, e.g., consisting of, SEQ ID NO: 289 and SEQ ID NO: 298, respectively. In an aspect, the first gRNA molecule and the second gRNA molecule include targeting domains comprising, e.g., consisting of, SEQ ID NO: 289 and SEQ ID NO: 322, respectively. In an aspect, the first gRNA molecule and the second gRNA molecule include targeting domains comprising, e.g., consisting of, SEQ ID NO: 289 and SEQ ID NO: 311, respectively. In an aspect, the first gRNA molecule and the second gRNA molecule include targeting domains comprising, e.g., consisting of, SEQ ID NO: 289 and SEQ ID NO: 315, respectively. In an aspect, the first gRNA molecule and the second gRNA molecule include targeting domains comprising, e.g., consisting of, SEQ ID NO: 289 and SEQ ID NO: 290, respectively. In an aspect, the first gRNA molecule and the second gRNA molecule include targeting domains comprising, e.g., consisting of, SEQ ID NO: 289 and SEQ ID NO: 317, respectively. In an aspect, the first gRNA molecule and the second gRNA molecule include targeting domains comprising, e.g., consisting of, SEQ ID NO: 289 and SEQ ID NO: 309, respectively. In an aspect, the first gRNA molecule and the second gRNA molecule include targeting domains comprising, e.g., consisting of, SEQ ID NO: 289 and SEQ ID NO: 281, respectively. In an aspect, the first gRNA molecule and the second gRNA molecule include targeting domains comprising, e.g., consisting of, SEQ ID NO: 281 and SEQ ID NO: 312, respectively. In an aspect, the first gRNA molecule and the second gRNA molecule include targeting domains comprising, e.g., consisting of, SEQ ID NO: 281 and SEQ ID NO: 313, respectively. In an aspect, the first gRNA molecule and the second gRNA molecule include targeting domains comprising, e.g., consisting of, SEQ ID NO: 281 and SEQ ID NO: 294, respectively. In an aspect, the first gRNA molecule and the second gRNA molecule include targeting domains comprising, e.g., consisting of, SEQ ID NO: 281 and SEQ ID NO: 310, respectively. In an aspect, the first gRNA molecule and the second gRNA molecule include targeting domains comprising, e.g., consisting of, SEQ ID NO: 281 and SEQ ID NO: 319, respectively. In an aspect, the first gRNA molecule and the second gRNA molecule include targeting domains comprising, e.g., consisting of, SEQ ID NO: 281 and SEQ ID NO: 298, respectively. In an aspect, the first gRNA molecule and the second gRNA molecule include targeting domains comprising, e.g., consisting of, SEQ ID NO: 281 and SEQ ID NO: 322, respectively. In an aspect, the first gRNA molecule and the second gRNA molecule include targeting domains comprising, e.g., consisting of, SEQ ID NO: 281 and SEQ ID NO: 311, respectively. In an aspect, the first gRNA molecule and the second gRNA molecule include targeting domains comprising, e.g., consisting of, SEQ ID NO: 281 and SEQ ID NO: 315, respectively. In an aspect, the first gRNA molecule and the second gRNA molecule include targeting domains comprising, e.g., consisting of, SEQ ID NO: 281 and SEQ ID NO: 290, respectively. In an aspect, the first gRNA molecule and the second gRNA molecule include targeting domains comprising, e.g., consisting of, SEQ ID NO: 281 and SEQ ID NO: 317, respectively. In an aspect, the first gRNA molecule and the second gRNA molecule include targeting domains comprising, e.g., consisting of, SEQ ID NO: 281 and SEQ ID NO: 309, respectively. In an aspect, the first gRNA molecule and the second gRNA molecule include targeting domains comprising, e.g., consisting of, SEQ ID NO: 281 and SEQ ID NO: 289, respectively.

TABLE 9
Preferred Guide RNA Targeting Domains directed to the +55
Enhancer Region of the BCL11a Gene (i.e., to a BCL11a Enhancer)

| | | | | | SEQ ID |
|---|---|---|---|---|---|
| ID | Species | Strand | Location | Targeting Domain Sequence | NO: |
| CR002142 | h | + | Chr2: 60498031-60498053 | CCUGGCAGACCCUCAAGAGC | 1596 |
| CR002143 | h | − | Chr2: 60498031-60498053 | CCUGGCAGACCCUCAAGAGC | 1597 |
| CR002144 | h | + | Chr2: 60498032-60498054 | CUGGCAGACCCUCAAGAGCA | 1598 |
| CR002145 | h | + | Chr2: 60498033-60498055 | UGGCAGACCCUCAAGAGCAG | 1599 |
| CR002146 | h | − | Chr2: 60498040-60498062 | CCCUCAAGAGCAGGGGUCUU | 1600 |
| CR002147 | h | − | Chr2: 60498041-60498063 | CCUCAAGAGCAGGGGUCUUC | 1601 |
| CR001262 | h | + | Chr1: 55039155-55039177 | UAAGGCCAGUGGAAAGAAUU | 1602 |
| CR002148 | h | + | Chr2: 60498045-60498067 | AAGAGCAGGGGUCUUCUCUU | 1603 |
| CR002149 | h | + | Chr2: 60498046-60498068 | AGAGCAGGGGUCUUCUCUUU | 1604 |
| CR002150 | h | + | Chr2: 60498047-60498069 | GAGCAGGGGUCUUCUCUUUG | 1605 |
| CR002151 | h | + | Chr2: 60498048-60498070 | AGCAGGGGUCUUCUCUUUGG | 1606 |
| CR002152 | h | + | Chr2: 60498051-60498073 | AGGGGUCUUCUCUUUGGGGG | 1607 |
| CR002153 | h | + | Chr2: 60498068-60498090 | GGGAGGACAUCACUCUUAGC | 1608 |
| CR002154 | h | + | Chr2: 60498069-60498091 | GGAGGACAUCACUCUUAGCA | 1609 |
| CR001261 | h | − | Chr1: 55039269-55039291 | GCCAGACUCCAAGUUCUGCC | 1610 |
| CR002155 | h | + | Chr2: 60498073-60498095 | GACAUCACUCUUAGCAGGGC | 1611 |
| CR002156 | h | + | Chr2: 60498074-60498096 | ACAUCACUCUUAGCAGGGCU | 1612 |
| CR002157 | h | + | Chr2: 60498075-60498097 | CAUCACUCUUAGCAGGGCUG | 1613 |
| CR002158 | h | + | Chr2: 60498091-60498113 | GCUGGGGUGAGUCAAAAGUC | 1614 |
| CR002159 | h | + | Chr2: 60498092-60498114 | CUGGGGUGAGUCAAAAGUCU | 1615 |
| CR002160 | h | + | Chr2: 60498099-60498121 | GAGUCAAAAGUCUGGGAGAA | 1616 |
| CR002161 | h | + | Chr2: 60498102-60498124 | UCAAAAGUCUGGGAGAAUGG | 1617 |
| CR002162 | h | + | Chr2: 60498107-60498129 | AGUCUGGGAGAAUGGAGGUG | 1618 |
| CR002163 | h | + | Chr2: 60498110-60498132 | CUGGGAGAAUGGAGGUGUGG | 1619 |
| CR002164 | h | + | Chr2: 60498111-60498133 | UGGGAGAAUGGAGGUGUGGA | 1620 |
| CR002165 | h | + | Chr2: 60498112-60498134 | GGGAGAAUGGAGGUGUGGAG | 1621 |
| CR002166 | h | + | Chr2: 60498120-60498142 | GGAGGUGUGGAGGGGAUAAC | 1622 |
| CR001263 | h | + | Chr1: 55039180-55039202 | GGCAGCGAGGAGUCCACAGU | 1623 |
| CR002167 | h | + | Chr2: 60498121-60498143 | GAGGUGUGGAGGGGAUAACU | 1624 |
| CR002168 | h | + | Chr2: 60498137-60498159 | AACUGGGUCAGACCCCAAGC | 1625 |
| CR002169 | h | + | Chr2: 60498141-60498163 | GGGUCAGACCCCAAGCAGGA | 1626 |
| CR002170 | h | + | Chr2: 60498142-60498164 | GGUCAGACCCCAAGCAGGAA | 1627 |
| CR002171 | h | − | Chr2: 60498149-60498171 | CCCCAAGCAGGAAGGGCCUC | 1628 |
| CR002172 | h | − | Chr2: 60498150-60498172 | CCCAAGCAGGAAGGGCCUCU | 1629 |
| CR002173 | h | − | Chr2: 60498151-60498173 | CCAAGCAGGAAGGGCCUCUA | 1630 |
| CR002174 | h | + | Chr2: 60498157-60498179 | AGGAAGGGCCUCUAUGUAGA | 1631 |
| CR002175 | h | + | Chr2: 60498158-60498180 | GGAAGGGCCUCUAUGUAGAC | 1632 |
| CR002176 | h | + | Chr2: 60498165-60498187 | CCUCUAUGUAGACGGGUGUG | 1633 |
| CR002177 | h | − | Chr2: 60498165-60498187 | CCUCUAUGUAGACGGGUGUG | 1634 |
| CR002178 | h | + | Chr2: 60498175-60498197 | GACGGGUGUGUGGCUCCUUA | 1635 |
| CR002179 | h | − | Chr2: 60498190-60498212 | CCUUAAGGUGACCCAGCAGC | 1636 |
| CR002180 | h | + | Chr2: 60498192-60498214 | UUAAGGUGACCCAGCAGCCC | 1637 |
| CR002181 | h | + | Chr2: 60498193-60498215 | UAAGGUGACCCAGCAGCCCU | 1638 |
| CR002182 | h | − | Chr2: 60498201-60498223 | CCCAGCAGCCCUGGGCACAG | 1639 |
| CR002183 | h | − | Chr2: 60498202-60498224 | CCAGCAGCCCUGGGCACAGA | 1640 |
| CR001261 | h | − | Chr1: 55039269-55039291 | GCCAGACUCCAAGUUCUGCC | 1641 |
| CR002184 | h | + | Chr2: 60498204-60498226 | AGCAGCCCUGGGCACAGAAG | 1642 |
| CR002185 | h | − | Chr2: 60498209-60498231 | CCCUGGGCACAGAAGUGGUG | 1643 |
| CR002186 | h | − | Chr2: 60498210-60498232 | CCUGGGCACAGAAGUGGUGC | 1644 |
| CR002187 | h | + | Chr2: 60498211-60498233 | CUGGGCACAGAAGUGGUGCG | 1645 |
| CR002188 | h | + | Chr2: 60498240-60498262 | UGCCAACAGUGAUAACCAGC | 1646 |
| CR002189 | h | + | Chr2: 60498241-60498263 | GCCAACAGUGAUAACCAGCA | 1647 |
| CR001262 | h | + | Chr1: 55039155-55039177 | UAAGGCCAGUGGAAAGAAUU | 1648 |
| CR002190 | h | − | Chr2: 60498242-60498264 | CCAACAGUGAUAACCAGCAG | 1649 |
| CR002191 | h | + | Chr2: 60498255-60498277 | CCAGCAGGGCCUGUCAGAAG | 1650 |
| CR002192 | h | − | Chr2: 60498255-60498277 | CCAGCAGGGCCUGUCAGAAG | 1651 |
| CR002193 | h | + | Chr2: 60498261-60498283 | GGGCCUGUCAGAAGAGGCCC | 1652 |
| CR002194 | h | − | Chr2: 60498264-60498286 | CCUGUCAGAAGAGGCCCUGG | 1653 |
| CR002195 | h | + | Chr2: 60498271-60498293 | GAAGAGGCCCUGGACACUGA | 1654 |
| CR002196 | h | + | Chr2: 60498275-60498297 | AGGCCCUGGACACUGAAGGC | 1655 |
| CR002197 | h | + | Chr2: 60498276-60498298 | GGCCCUGGACACUGAAGGCU | 1656 |
| CR001264 | h | − | Chr1: 55039149-55039171 | UCUUUCCACUGGCCUUAACC | 1657 |
| CR002198 | h | − | Chr2: 60498278-60498300 | CCCUGGACACUGAAGGCUGG | 1658 |
| CR002199 | h | − | Chr2: 60498279-60498301 | CCUGGACACUGAAGGCUGGG | 1659 |
| CR002200 | h | + | Chr2: 60498287-60498309 | CUGAAGGCUGGGCACAGCCU | 1660 |
| CR002201 | h | + | Chr2: 60498288-60498310 | UGAAGGCUGGGCACAGCCUU | 1661 |
| CR002202 | h | + | Chr2: 60498289-60498311 | GAAGGCUGGGCACAGCCUUG | 1662 |
| CR002203 | h | + | Chr2: 60498301-60498323 | CAGCCUUGGGGACCGCUCAC | 1663 |
| CR002204 | h | − | Chr2: 60498304-60498326 | CCUUGGGGACCGCUCACAGG | 1664 |
| CR002205 | h | − | Chr2: 60498313-60498335 | CCGCUCACAGGACAUGCAGC | 1665 |
| CR002206 | h | − | Chr2: 60498341-60498363 | CCGACAACUCCCUACCGCGA | 1666 |
| CR002207 | h | − | Chr2: 60498350-60498372 | CCCUACCGCGACCCCUAUCA | 1667 |
| CR002208 | h | − | Chr2: 60498351-60498373 | CCUACCGCGACCCCUAUCAG | 1668 |
| CR002209 | h | − | Chr2: 60498355-60498377 | CCGCGACCCCUAUCAGUGCC | 1669 |
| CR002210 | h | − | Chr2: 60498361-60498383 | CCCCUAUCAGUGCCGACCAA | 1670 |
| CR002211 | h | − | Chr2: 60498362-60498384 | CCCUAUCAGUGCCGACCAAG | 1671 |
| CR002212 | h | − | Chr2: 60498363-60498385 | CCUAUCAGUGCCGACCAAGC | 1672 |
| CR002213 | h | − | Chr2: 60498373-60498395 | CCGACCAAGCACACAAGAUG | 1673 |
| CR002214 | h | − | Chr2: 60498377-60498399 | CCAAGCACACAAGAUGCACA | 1674 |
| CR002215 | h | + | Chr2: 60498380-60498402 | AGCACACAAGAUGCACACCC | 1675 |
| CR002216 | h | + | Chr2: 60498384-60498406 | CACAAGAUGCACACCCAGGC | 1676 |
| CR002217 | h | + | Chr2: 60498385-60498407 | ACAAGAUGCACACCCAGGCU | 1677 |
| CR001264 | h | − | Chr1: 55039149-55039171 | UCUUUCCACUGGCCUUAACC | 1678 |
| CR002218 | h | + | Chr2: 60498389-60498411 | GAUGCACACCCAGGCUGGGC | 1679 |
| CR002219 | h | + | Chr2: 60498396-60498418 | ACCCAGGCUGGGCUGGACAG | 1680 |
| CR002220 | h | + | Chr2: 60498397-60498419 | CCCAGGCUGGGCUGGACAGA | 1681 |
| CR002221 | h | − | Chr2: 60498397-60498419 | CCCAGGCUGGGCUGGACAGA | 1682 |
| CR002222 | h | + | Chr2: 60498398-60498420 | CCAGGCUGGGCUGGACAGAG | 1683 |
| CR002223 | h | − | Chr2: 60498398-60498420 | CCAGGCUGGGCUGGACAGAG | 1684 |
| CR002224 | h | + | Chr2: 60498415-60498437 | GAGGGGUCCCACAAGAUCAC | 1685 |
| CR002225 | h | + | Chr2: 60498416-60498438 | AGGGGUCCCACAAGAUCACA | 1686 |
| CR002226 | h | − | Chr2: 60498422-60498444 | CCCACAAGAUCACAGGGUGU | 1687 |
| CR001263 | h | + | Chr1: 55039180-55039202 | GGCAGCGAGGAGUCCACAGU | 1688 |
| CR002227 | h | − | Chr2: 60498423-60498445 | CCACAAGAUCACAGGGUGUG | 1689 |
| CR002228 | h | + | Chr2: 60498431-60498453 | UCACAGGGUGUGCCCUGAGA | 1690 |
| CR002229 | h | + | Chr2: 60498434-60498456 | CAGGGUGUGCCCUGAGAAGG | 1691 |

[0361] In some aspects of the invention, it is preferred that the gRNA molecule to the +55 Enhancer region of BCL11a comprise a targeting domain comprising, e.g., consisting of a targeting domain sequence selected from SEQ ID NO: 1683, SEQ ID NO: 1638, SEQ ID NO: 1647, SEQ ID NO: 1609, SEQ ID NO: 1621, SEQ ID NO: 1617, SEQ ID NO: 1654, SEQ ID NO: 1631, SEQ ID NO: 1620, SEQ ID NO: 1637, SEQ ID NO: 1612, SEQ ID NO: 1656, SEQ ID NO: 1619, SEQ ID NO: 1675, SEQ ID NO: 1645, SEQ ID NO: 1598, SEQ ID NO: 1599, SEQ ID NO: 1663, SEQ ID NO: 1677, and SEQ ID NO: 1626.

[0362] In some aspects of the invention, e.g., as indicated herein, it may be beneficial to include gRNA moleucles targeting more than one, e.g., two, target sites (e.g., a first gRNA molecule and a second gRNA molecule). In some embodiments, the two target sites are both located in the +55 BCL11a enhancer region. In such aspects, any combination of more than one, e.g., two, gRNA molecules (e.g., a first gRNA molecule and a second gRNA molecule) comprising, e.g., consisting of, targeting domains listed in Table 9 may be used, that target different target sites of the +55 BCL11a enhancer region. In an aspect, the first gRNA molecule and the second gRNA molecule include targeting domains comprising, e.g., consisting of, SEQ ID NO: 1683 and SEQ ID NO: 1638, respectively. In an aspect, the first gRNA molecule and the second gRNA molecule include targeting domains comprising, e.g., consisting of, SEQ ID NO: 1683 and SEQ ID NO: 1647, respectively. In an aspect, the first gRNA molecule and the second gRNA molecule include targeting domains comprising, e.g., consisting of, SEQ ID NO: 1683 and SEQ ID NO: 1609, respectively. In an aspect, the first gRNA molecule and the second gRNA molecule include targeting domains comprising, e.g., consisting of, SEQ ID NO: 1683 and SEQ ID NO: 1621, respectively. In an aspect, the first gRNA molecule and the second gRNA molecule include targeting domains comprising, e.g., consisting of, SEQ ID NO: 1683 and SEQ ID NO: 1617, respectively. In an aspect, the first gRNA molecule and the second gRNA molecule include targeting domains comprising, e.g., consisting of, SEQ ID NO: 1683 and SEQ ID NO: 1654, respectively. In an aspect, the first gRNA molecule and the second gRNA molecule include targeting domains comprising, e.g., consisting of, SEQ ID NO: 1683 and SEQ ID NO: 1631, respectively. In an aspect, the first gRNA molecule and the second gRNA molecule include targeting domains comprising, e.g., consisting of, SEQ ID NO: 1683 and SEQ ID NO: 1620, respectively. In an aspect, the first gRNA molecule and the second gRNA molecule include targeting domains comprising, e.g., consisting of, SEQ ID NO: 1683 and SEQ ID NO: 1637, respectively. In an aspect, the first gRNA molecule and the second gRNA molecule include targeting domains comprising, e.g., consisting of, SEQ ID NO: 1683 and SEQ ID NO: 1612, respectively. In an aspect, the first gRNA molecule and the second gRNA molecule include targeting domains comprising, e.g., consisting of, SEQ ID NO: 1683 and SEQ ID NO: 1656, respectively. In an aspect, the first gRNA molecule and the second gRNA molecule include targeting domains comprising, e.g., consisting of, SEQ ID NO: 1683 and SEQ ID NO: 1619, respectively. In an aspect, the first gRNA molecule and the second gRNA molecule include targeting domains comprising, e.g., consisting of, SEQ ID NO: 1683 and SEQ ID NO: 1675, respectively. In an aspect, the first gRNA molecule and the second gRNA molecule include targeting domains comprising, e.g., consisting of, SEQ ID NO: 1683 and SEQ ID NO: 1645, respectively. In an aspect, the first gRNA molecule and the second gRNA molecule include targeting domains comprising, e.g., consisting of, SEQ ID NO: 1683 and SEQ ID NO: 1598, respectively. In an aspect, the first gRNA molecule and the second gRNA molecule include targeting domains comprising, e.g., consisting of, SEQ ID NO: 1683 and SEQ ID NO: 1599, respectively. In an aspect, the first gRNA molecule and the second gRNA molecule include targeting domains comprising, e.g., consisting of, SEQ ID NO: 1683 and SEQ ID NO: 1663, respectively. In an aspect, the first gRNA molecule and the second gRNA molecule include targeting domains comprising, e.g., consisting of, SEQ ID NO: 1683 and SEQ ID NO: 1677, respectively. In an aspect, the first gRNA molecule and the second gRNA molecule include targeting domains comprising, e.g., consisting of, SEQ ID NO: 1683 and SEQ ID NO: 1626, respectively. In an aspect, the first gRNA molecule and the second gRNA molecule include targeting domains comprising, e.g., consisting of, SEQ ID NO: 1638 and SEQ ID NO: 1647, respectively. In an aspect, the first gRNA molecule and the second gRNA molecule include targeting domains comprising, e.g., consisting of, SEQ ID NO: 1638 and SEQ ID NO: 1609, respectively. In an aspect, the first gRNA molecule and the second gRNA molecule include targeting domains comprising, e.g., consisting of, SEQ ID NO: 1638 and SEQ ID NO: 1621, respectively. In an aspect, the first gRNA molecule and the second gRNA molecule include targeting domains comprising, e.g., consisting of, SEQ ID NO: 1638 and SEQ ID NO: 1617, respectively. In an aspect, the first gRNA molecule and the second gRNA molecule include targeting domains comprising, e.g., consisting of, SEQ ID NO: 1638 and SEQ ID NO: 1654, respectively. In an aspect, the first gRNA molecule and the second gRNA molecule include targeting domains comprising, e.g., consisting of, SEQ ID NO: 1638 and SEQ ID NO: 1631, respectively. In an aspect, the first gRNA molecule and the second gRNA molecule include targeting domains comprising, e.g., consisting of, SEQ ID NO: 1638 and SEQ ID NO: 1620, respectively. In an aspect, the first gRNA molecule and the second gRNA molecule include targeting domains comprising, e.g., consisting of, SEQ ID NO: 1638 and SEQ ID NO: 1637, respectively. In an aspect, the first gRNA molecule and the second gRNA molecule include targeting domains comprising, e.g., consisting of, SEQ ID NO: 1638 and SEQ ID NO: 1612, respectively. In an aspect, the first gRNA molecule and the second gRNA molecule include targeting domains comprising, e.g., consisting of, SEQ ID NO: 1638 and SEQ ID NO: 1656, respectively. In an aspect, the first gRNA molecule and the second gRNA molecule include targeting domains comprising, e.g., consisting of, SEQ ID NO: 1638 and SEQ ID NO: 1619, respectively. In an aspect, the first gRNA molecule and the second gRNA molecule include targeting domains comprising, e.g., consisting of, SEQ ID NO: 1638 and SEQ ID NO: 1675, respectively. In an aspect, the first gRNA molecule and the second gRNA molecule include targeting domains comprising, e.g., consisting of, SEQ ID NO: 1638 and SEQ ID NO: 1645, respectively. In an aspect, the first gRNA molecule and the second gRNA molecule include targeting domains comprising, e.g., consisting of, SEQ ID NO: 1638 and SEQ ID NO: 1598, respectively. In an aspect, the first gRNA molecule and the second gRNA molecule include targeting domains comprising, e.g., consisting of, SEQ ID NO: 1638 and SEQ ID NO: 1599, respectively. In an aspect, the first gRNA molecule and the second gRNA molecule include targeting domains comprising, e.g., consisting of, SEQ ID NO: 1638 and SEQ ID NO: 1663, respectively. In an aspect, the first gRNA molecule and the second gRNA molecule include targeting domains comprising, e.g., consisting of, SEQ ID NO: 1638 and SEQ ID NO: 1677, respectively. In an aspect, the first gRNA molecule and the second gRNA molecule include targeting domains comprising, e.g., consisting of, SEQ ID NO: 1638 and SEQ ID NO: 1626, respectively. In an aspect, the first gRNA molecule and the second gRNA molecule include targeting domains comprising, e.g., consisting of, SEQ ID NO: 1647 and SEQ ID NO: 1638, respectively. In an aspect, the first gRNA molecule and the second gRNA molecule include targeting domains comprising, e.g., consisting of, SEQ ID NO: 1647 and SEQ ID NO: 1609, respectively. In an aspect, the first gRNA molecule and the second gRNA molecule include targeting domains comprising, e.g., consisting of, SEQ ID NO: 1647 and SEQ ID NO: 1621, respectively. In an aspect, the first gRNA molecule and the second gRNA molecule include targeting domains comprising, e.g., consisting of, SEQ ID NO: 1647 and SEQ ID NO: 1617, respectively. In an aspect, the first gRNA molecule and the second gRNA molecule include targeting domains comprising, e.g., consisting of, SEQ ID NO: 1647 and SEQ ID NO: 1654, respectively. In an aspect, the first gRNA molecule and the second gRNA molecule include targeting domains comprising, e.g., consisting of, SEQ ID NO: 1647 and SEQ ID NO: 1631, respectively. In an aspect, the first gRNA molecule and the second gRNA molecule include targeting domains comprising, e.g., consisting of, SEQ ID NO: 1647 and SEQ ID NO: 1620, respectively. In an aspect, the first gRNA molecule and the second gRNA molecule include targeting domains comprising, e.g., consisting of, SEQ ID NO: 1647 and SEQ ID NO: 1637, respectively. In an aspect, the first gRNA molecule and the second gRNA molecule include targeting domains comprising, e.g., consisting of, SEQ ID NO: 1647 and SEQ ID NO: 1612, respectively. In an aspect, the first gRNA molecule and the second gRNA molecule include targeting domains comprising, e.g., consisting of, SEQ ID NO: 1647 and SEQ ID NO: 1656, respectively. In an aspect, the first gRNA molecule and the second gRNA molecule include targeting domains comprising, e.g., consisting of, SEQ ID NO: 1647 and SEQ ID NO: 1619, respectively. In an aspect, the first gRNA molecule and the second gRNA molecule include targeting domains comprising, e.g., consisting of, SEQ ID NO: 1647 and SEQ ID NO: 1675, respectively. In an aspect, the first gRNA molecule and the second gRNA molecule include targeting domains comprising, e.g., consisting of, SEQ ID NO: 1647 and SEQ ID NO: 1645, respectively. In an aspect, the first gRNA molecule and the second gRNA molecule include targeting domains comprising, e.g., consisting of, SEQ ID NO: 1647 and SEQ ID NO: 1598, respectively. In an aspect, the first gRNA molecule and the second gRNA molecule include targeting domains comprising, e.g., consisting of, SEQ ID NO: 1647 and SEQ ID NO: 1599, respectively. In an aspect, the first gRNA molecule and the second gRNA molecule include targeting domains comprising, e.g., consisting of, SEQ ID NO: 1647 and SEQ ID NO: 1663, respectively. In an aspect, the first gRNA molecule and the second gRNA molecule include targeting domains comprising, e.g., consisting of, SEQ ID NO: 1647 and SEQ ID NO: 1677, respectively. In an aspect, the first gRNA molecule and the second gRNA molecule include targeting domains comprising, e.g., consisting of, SEQ ID NO: 1647 and SEQ ID NO: 1626, respectively. In an aspect, the first gRNA molecule and the second gRNA molecule include targeting domains comprising, e.g., consisting of, SEQ ID NO: 1609 and SEQ ID NO: 1638, respectively. In an aspect, the first gRNA molecule and the second gRNA molecule include targeting domains comprising, e.g., consisting of, SEQ ID NO: 1609 and SEQ ID NO: 1647, respectively. In an aspect, the first gRNA molecule and the second gRNA molecule include targeting domains comprising, e.g., consisting of, SEQ ID NO: 1609 and SEQ ID NO: 1621, respectively. In an aspect, the first gRNA molecule and the second gRNA molecule include targeting domains comprising, e.g., consisting of, SEQ ID NO: 1609 and SEQ ID NO: 1617, respectively. In an aspect, the first gRNA molecule and the second gRNA molecule include targeting domains comprising, e.g., consisting of, SEQ ID NO: 1609 and SEQ ID NO: 1654, respectively. In an aspect, the first gRNA molecule and the second gRNA molecule include targeting domains comprising, e.g., consisting of, SEQ ID NO: 1609 and SEQ ID NO: 1631, respectively. In an aspect, the first gRNA molecule and the second gRNA molecule include targeting domains comprising, e.g., consisting of, SEQ ID NO: 1609 and SEQ ID NO: 1620, respectively. In an aspect, the first gRNA molecule and the second gRNA molecule include targeting domains comprising, e.g., consisting of, SEQ ID NO: 1609 and SEQ ID NO: 1637, respectively. In an aspect, the first gRNA molecule and the second gRNA molecule include targeting domains comprising, e.g., consisting of, SEQ ID NO: 1609 and SEQ ID NO: 1612, respectively. In an aspect, the first gRNA molecule and the second gRNA molecule include targeting domains comprising, e.g., consisting of, SEQ ID NO: 1609 and SEQ ID NO: 1656, respectively. In an aspect, the first gRNA molecule and the second gRNA molecule include targeting domains comprising, e.g., consisting of, SEQ ID NO: 1609 and SEQ ID NO: 1619, respectively. In an aspect, the first gRNA molecule and the second gRNA molecule include targeting domains comprising, e.g., consisting of, SEQ ID NO: 1609 and SEQ ID NO: 1675, respectively. In an aspect, the first gRNA molecule and the second gRNA molecule include targeting domains comprising, e.g., consisting of, SEQ ID NO: 1609 and SEQ ID NO: 1645, respectively. In an aspect, the first gRNA molecule and the second gRNA molecule include targeting domains comprising, e.g., consisting of, SEQ ID NO: 1609 and SEQ ID NO: 1598, respectively. In an aspect, the first gRNA molecule and the second gRNA molecule include targeting domains comprising, e.g., consisting of, SEQ ID NO: 1609 and SEQ ID NO: 1599, respectively. In an aspect, the first gRNA molecule and the second gRNA molecule include targeting domains comprising, e.g., consisting of, SEQ ID NO: 1609 and SEQ ID NO: 1663, respectively. In an aspect, the first gRNA molecule and the second gRNA molecule include targeting domains comprising, e.g., consisting of, SEQ ID NO: 1609 and SEQ ID NO: 1677, respectively. In an aspect, the first gRNA molecule and the second gRNA molecule include targeting domains comprising, e.g., consisting of, SEQ ID NO: 1609 and SEQ ID NO: 1626, respectively. In an aspect, the first gRNA molecule and the second gRNA molecule include targeting domains comprising, e.g., consisting of, SEQ ID NO: 1621 and SEQ ID NO: 1638, respectively. In an aspect, the first gRNA molecule and the second gRNA molecule include targeting domains comprising, e.g., consisting of, SEQ ID NO: 1621 and SEQ ID NO: 1647, respectively. In an aspect, the first gRNA molecule and the second gRNA molecule include targeting domains comprising, e.g., consisting of, SEQ ID NO: 1621 and SEQ ID NO: 1609, respectively. In an aspect, the first gRNA molecule and the second gRNA molecule include targeting domains comprising, e.g., consisting of, SEQ ID NO: 1621 and SEQ ID NO: 1617, respectively. In an aspect, the first gRNA molecule and the second gRNA molecule include targeting domains comprising, e.g., consisting of, SEQ ID NO: 1621 and SEQ ID NO: 1654, respectively. In an aspect, the first gRNA molecule and the second gRNA molecule include targeting domains comprising, e.g., consisting of, SEQ ID NO: 1621 and SEQ ID NO: 1631, respectively. In an aspect, the first gRNA molecule and the second gRNA molecule include targeting domains comprising, e.g., consisting of, SEQ ID NO: 1621 and SEQ ID NO: 1620, respectively. In an aspect, the first gRNA molecule and the second gRNA molecule include targeting domains comprising, e.g., consisting of, SEQ ID NO: 1621 and SEQ ID NO: 1637, respectively. In an aspect, the first gRNA molecule and the second gRNA molecule include targeting domains comprising, e.g., consisting of, SEQ ID NO: 1621 and SEQ ID NO: 1612, respectively. In an aspect, the first gRNA molecule and the second gRNA molecule include targeting domains comprising, e.g., consisting of, SEQ ID NO: 1621 and SEQ ID NO: 1656, respectively. In an aspect, the first gRNA molecule and the second gRNA molecule include targeting domains comprising, e.g., consisting of, SEQ ID NO: 1621 and SEQ ID NO: 1619, respectively. In an aspect, the first gRNA molecule and the second gRNA molecule include targeting domains comprising, e.g., consisting of, SEQ ID NO: 1621 and SEQ ID NO: 1675, respectively. In an aspect, the first gRNA molecule and the second gRNA molecule include targeting domains comprising, e.g., consisting of, SEQ ID NO: 1621 and SEQ ID NO: 1645, respectively. In an aspect, the first gRNA molecule and the second gRNA molecule include targeting domains comprising, e.g., consisting of, SEQ ID NO: 1621 and SEQ ID NO: 1598, respectively. In an aspect, the first gRNA molecule and the second gRNA molecule include targeting domains comprising, e.g., consisting of, SEQ ID NO: 1621 and SEQ ID NO: 1599, respectively. In an aspect, the first gRNA molecule and the second gRNA molecule include targeting domains comprising, e.g., consisting of, SEQ ID NO: 1621 and SEQ ID NO: 1663, respectively. In an aspect, the first gRNA molecule and the second gRNA molecule include targeting domains comprising, e.g., consisting of, SEQ ID NO: 1621 and SEQ ID NO: 1677, respectively. In an aspect, the first gRNA molecule and the second gRNA molecule include targeting domains comprising, e.g., consisting of, SEQ ID NO: 1621 and SEQ ID NO: 1626, respectively. In an aspect, the first gRNA molecule and the second gRNA molecule include targeting domains comprising, e.g., consisting of, SEQ ID NO: 1617 and SEQ ID NO: 1638, respectively. In an aspect, the first gRNA molecule and the second gRNA molecule include targeting domains comprising, e.g., consisting of, SEQ ID NO: 1617 and SEQ ID NO: 1647, respectively. In an aspect, the first gRNA molecule and the second gRNA molecule include targeting domains comprising, e.g., consisting of, SEQ ID NO: 1617 and SEQ ID NO: 1609, respectively. In an aspect, the first gRNA molecule and the second gRNA molecule include targeting domains comprising, e.g., consisting of, SEQ ID NO: 1617 and SEQ ID NO: 1621, respectively. In an aspect, the first gRNA molecule and the second gRNA molecule include targeting domains comprising, e.g., consisting of, SEQ ID NO: 1617 and SEQ ID NO: 1654, respectively. In an aspect, the first gRNA molecule and the second gRNA molecule include targeting domains comprising, e.g., consisting of, SEQ ID NO: 1617 and SEQ ID NO: 1631, respectively. In an aspect, the first gRNA molecule and the second gRNA molecule include targeting domains comprising, e.g., consisting of, SEQ ID NO: 1617 and SEQ ID NO: 1620, respectively. In an aspect, the first gRNA molecule and the second gRNA molecule include targeting domains comprising, e.g., consisting of, SEQ ID NO: 1617 and SEQ ID NO: 1637, respectively. In an aspect, the first gRNA molecule and the second gRNA molecule include targeting domains comprising, e.g., consisting of, SEQ ID NO: 1617 and SEQ ID NO: 1612, respectively. In an aspect, the first gRNA molecule and the second gRNA molecule include targeting domains comprising, e.g., consisting of, SEQ ID NO: 1617 and SEQ ID NO: 1656, respectively. In an aspect, the first gRNA molecule and the second gRNA molecule include targeting domains comprising, e.g., consisting of, SEQ ID NO: 1617 and SEQ ID NO: 1619, respectively. In an aspect, the first gRNA molecule and the second gRNA molecule include targeting domains comprising, e.g., consisting of, SEQ ID NO: 1617 and SEQ ID NO: 1675, respectively. In an aspect, the first gRNA molecule and the second gRNA molecule include targeting domains comprising, e.g., consisting of, SEQ ID NO: 1617 and SEQ ID NO: 1645, respectively. In an aspect, the first gRNA molecule and the second gRNA molecule include targeting domains comprising, e.g., consisting of, SEQ ID NO: 1617 and SEQ ID NO: 1598, respectively. In an aspect, the first gRNA molecule and the second gRNA molecule include targeting domains comprising, e.g., consisting of, SEQ ID NO: 1617 and SEQ ID NO: 1599, respectively. In an aspect, the first gRNA molecule and the second gRNA molecule include targeting domains comprising, e.g., consisting of, SEQ ID NO: 1617 and SEQ ID NO: 1663, respectively. In an aspect, the first gRNA molecule and the second gRNA molecule include targeting domains comprising, e.g., consisting of, SEQ ID NO: 1617 and SEQ ID NO: 1677, respectively. In an aspect, the first gRNA molecule and the second gRNA molecule include targeting domains comprising, e.g., consisting of, SEQ ID NO: 1617 and SEQ ID NO: 1626, respectively. In an aspect, the first gRNA molecule and the second gRNA molecule include targeting domains comprising, e.g., consisting of, SEQ ID NO: 1654 and SEQ ID NO: 1638, respectively. In an aspect, the first gRNA molecule and the second gRNA molecule include targeting domains comprising, e.g., consisting of, SEQ ID NO: 1654 and SEQ ID NO: 1647, respectively. In an aspect, the first gRNA molecule and the second gRNA molecule include targeting domains comprising, e.g., consisting of, SEQ ID NO: 1654 and SEQ ID NO: 1609, respectively. In an aspect, the first gRNA molecule and the second gRNA molecule include targeting domains comprising, e.g., consisting of, SEQ ID NO: 1654 and SEQ ID NO: 1621, respectively. In an aspect, the first gRNA molecule and the second gRNA molecule include targeting domains comprising, e.g., consisting of, SEQ ID NO: 1654 and SEQ ID NO: 1617, respectively. In an aspect, the first gRNA molecule and the second gRNA molecule include targeting domains comprising, e.g., consisting of, SEQ ID NO: 1654 and SEQ ID NO: 1631, respectively. In an aspect, the first gRNA molecule and the second gRNA molecule include targeting domains comprising, e.g., consisting of, SEQ ID NO: 1654 and SEQ ID NO: 1620, respectively. In an aspect, the first gRNA molecule and the second gRNA molecule include targeting domains comprising, e.g., consisting of, SEQ ID NO: 1654 and SEQ ID NO: 1637, respectively. In an aspect, the first gRNA molecule and the second gRNA molecule include targeting domains comprising, e.g., consisting of, SEQ ID NO: 1654 and SEQ ID NO: 1612, respectively. In an aspect, the first gRNA molecule and the second gRNA molecule include targeting domains comprising, e.g., consisting of, SEQ ID NO: 1654 and SEQ ID NO: 1656, respectively. In an aspect, the first gRNA molecule and the second gRNA molecule include targeting domains comprising, e.g., consisting of, SEQ ID NO: 1654 and SEQ ID NO: 1619, respectively. In an aspect, the first gRNA molecule and the second gRNA molecule include targeting domains comprising, e.g., consisting of, SEQ ID NO: 1654 and SEQ ID NO: 1675, respectively. In an aspect, the first gRNA molecule and the second gRNA molecule include targeting domains comprising, e.g., consisting of, SEQ ID NO: 1654 and SEQ ID NO: 1645, respectively. In an aspect, the first gRNA molecule and the second gRNA molecule include targeting domains comprising, e.g., consisting of, SEQ ID NO: 1654 and SEQ ID NO: 1598, respectively. In an aspect, the first gRNA molecule and the second gRNA molecule include targeting domains comprising, e.g., consisting of, SEQ ID NO: 1654 and SEQ ID NO: 1599, respectively. In an aspect, the first gRNA molecule and the second gRNA molecule include targeting domains comprising, e.g., consisting of, SEQ ID NO: 1654 and SEQ ID NO: 1663, respectively. In an aspect, the first gRNA molecule and the second gRNA molecule include targeting domains comprising, e.g., consisting of, SEQ ID NO: 1654 and SEQ ID NO: 1677, respectively. In an aspect, the first gRNA molecule and the second gRNA molecule include targeting domains comprising, e.g., consisting of, SEQ ID NO: 1654 and SEQ ID NO: 1626, respectively. In an aspect, the first gRNA molecule and the second gRNA molecule include targeting domains comprising, e.g., consisting of, SEQ ID NO: 1631 and SEQ ID NO: 1638, respectively. In an aspect, the first gRNA molecule and the second gRNA molecule include targeting domains comprising, e.g., consisting of, SEQ ID NO: 1631 and SEQ ID NO: 1647, respectively. In an aspect, the first gRNA molecule and the second gRNA molecule include targeting domains comprising, e.g., consisting of, SEQ ID NO: 1631 and SEQ ID NO: 1609, respectively. In an aspect, the first gRNA molecule and the second gRNA molecule include targeting domains comprising, e.g., consisting of, SEQ ID NO: 1631 and SEQ ID NO: 1621, respectively. In an aspect, the first gRNA molecule and the second gRNA molecule include targeting domains comprising, e.g., consisting of, SEQ ID NO: 1631 and SEQ ID NO: 1617, respectively. In an aspect, the first gRNA molecule and the second gRNA molecule include targeting domains comprising, e.g., consisting of, SEQ ID NO: 1631 and SEQ ID NO: 1654, respectively. In an aspect, the first gRNA molecule and the second gRNA molecule include targeting domains comprising, e.g., consisting of, SEQ ID NO: 1631 and SEQ ID NO: 1620, respectively. In an aspect, the first gRNA molecule and the second gRNA molecule include targeting domains comprising, e.g., consisting of, SEQ ID NO: 1631 and SEQ ID NO: 1637, respectively. In an aspect, the first gRNA molecule and the second gRNA molecule include targeting domains comprising, e.g., consisting of, SEQ ID NO: 1631 and SEQ ID NO: 1612, respectively. In an aspect, the first gRNA molecule and the second gRNA molecule include targeting domains comprising, e.g., consisting of, SEQ ID NO: 1631 and SEQ ID NO: 1656, respectively. In an aspect, the first gRNA molecule and the second gRNA molecule include targeting domains comprising, e.g., consisting of, SEQ ID NO: 1631 and SEQ ID NO: 1619, respectively. In an aspect, the first gRNA molecule and the second gRNA molecule include targeting domains comprising, e.g., consisting of, SEQ ID NO: 1631 and SEQ ID NO: 1675, respectively. In an aspect, the first gRNA molecule and the second gRNA molecule include targeting domains comprising, e.g., consisting of, SEQ ID NO: 1631 and SEQ ID NO: 1645, respectively. In an aspect, the first gRNA molecule and the second gRNA molecule include targeting domains comprising, e.g., consisting of, SEQ ID NO: 1631 and SEQ ID NO: 1598, respectively. In an aspect, the first gRNA molecule and the second gRNA molecule include targeting domains comprising, e.g., consisting of, SEQ ID NO: 1631 and SEQ ID NO: 1599, respectively. In an aspect, the first gRNA molecule and the second gRNA molecule include targeting domains comprising, e.g., consisting of, SEQ ID NO: 1631 and SEQ ID NO: 1663, respectively. In an aspect, the first gRNA molecule and the second gRNA molecule include targeting domains comprising, e.g., consisting of, SEQ ID NO: 1631 and SEQ ID NO: 1677, respectively. In an aspect, the first gRNA molecule and the second gRNA molecule include targeting domains comprising, e.g., consisting of, SEQ ID NO: 1631 and SEQ ID NO: 1626, respectively. In an aspect, the first gRNA molecule and the second gRNA molecule include targeting domains comprising, e.g., consisting of, SEQ ID NO: 1620 and SEQ ID NO: 1638, respectively. In an aspect, the first gRNA molecule and the second gRNA molecule include targeting domains comprising, e.g., consisting of, SEQ ID NO: 1620 and SEQ ID NO: 1647, respectively. In an aspect, the first gRNA molecule and the second gRNA molecule include targeting domains comprising, e.g., consisting of, SEQ ID NO: 1620 and SEQ ID NO: 1609, respectively. In an aspect, the first gRNA molecule and the second gRNA molecule include targeting domains comprising, e.g., consisting of, SEQ ID NO: 1620 and SEQ ID NO: 1621, respectively. In an aspect, the first gRNA molecule and the second gRNA molecule include targeting domains comprising, e.g., consisting of, SEQ ID NO: 1620 and SEQ ID NO: 1617, respectively. In an aspect, the first gRNA molecule and the second gRNA molecule include targeting domains comprising, e.g., consisting of, SEQ ID NO: 1620 and SEQ ID NO: 1654, respectively. In an aspect, the first gRNA molecule and the second gRNA molecule include targeting domains comprising, e.g., consisting of, SEQ ID NO: 1620 and SEQ ID NO: 1631, respectively. In an aspect, the first gRNA molecule and the second gRNA molecule include targeting domains comprising, e.g., consisting of, SEQ ID NO: 1620 and SEQ ID NO: 1637, respectively. In an aspect, the first gRNA molecule and the second gRNA molecule include targeting domains comprising, e.g., consisting of, SEQ ID NO: 1620 and SEQ ID NO: 1612, respectively. In an aspect, the first gRNA molecule and the second gRNA molecule include targeting domains comprising, e.g., consisting of, SEQ ID NO: 1620 and SEQ ID NO: 1656, respectively. In an aspect, the first gRNA molecule and the second gRNA molecule include targeting domains comprising, e.g., consisting of, SEQ ID NO: 1620 and SEQ ID NO: 1619, respectively. In an aspect, the first gRNA molecule and the second gRNA molecule include targeting domains comprising, e.g., consisting of, SEQ ID NO: 1620 and SEQ ID NO: 1675, respectively. In an aspect, the first gRNA molecule and the second gRNA molecule include targeting domains comprising, e.g., consisting of, SEQ ID NO: 1620 and SEQ ID NO: 1645, respectively. In an aspect, the first gRNA molecule and the second gRNA molecule include targeting domains comprising, e.g., consisting of, SEQ ID NO: 1620 and SEQ ID NO: 1598, respectively. In an aspect, the first gRNA molecule and the second gRNA molecule include targeting domains comprising, e.g., consisting of, SEQ ID NO: 1620 and SEQ ID NO: 1599, respectively. In an aspect, the first gRNA molecule and the second gRNA molecule include targeting domains comprising, e.g., consisting of, SEQ ID NO: 1620 and SEQ ID NO: 1663, respectively. In an aspect, the first gRNA molecule and the second gRNA molecule include targeting domains comprising, e.g., consisting of, SEQ ID NO: 1620 and SEQ ID NO: 1677, respectively. In an aspect, the first gRNA molecule and the second gRNA molecule include targeting domains comprising, e.g., consisting of, SEQ ID NO: 1620 and SEQ ID NO: 1626, respectively. In an aspect, the first gRNA molecule and the second gRNA molecule include targeting domains comprising, e.g., consisting of, SEQ ID NO: 1637 and SEQ ID NO: 1638, respectively. In an aspect, the first gRNA molecule and the second gRNA molecule include targeting domains comprising, e.g., consisting of, SEQ ID NO: 1637 and SEQ ID NO: 1647, respectively. In an aspect, the first gRNA molecule and the second gRNA molecule include targeting domains comprising, e.g., consisting of, SEQ ID NO: 1637 and SEQ ID NO: 1609, respectively. In an aspect, the first gRNA molecule and the second gRNA molecule include targeting domains comprising, e.g., consisting of, SEQ ID NO: 1637 and SEQ ID NO: 1621, respectively. In an aspect, the first gRNA molecule and the second gRNA molecule include targeting domains comprising, e.g., consisting of, SEQ ID NO: 1637 and SEQ ID NO: 1617, respectively. In an aspect, the first gRNA molecule and the second gRNA molecule include targeting domains comprising, e.g., consisting of, SEQ ID NO: 1637 and SEQ ID NO: 1654, respectively. In an aspect, the first gRNA molecule and the second gRNA molecule include targeting domains comprising, e.g., consisting of, SEQ ID NO: 1637 and SEQ ID NO: 1631, respectively. In an aspect, the first gRNA molecule and the second gRNA molecule include targeting domains comprising, e.g., consisting of, SEQ ID NO: 1637 and SEQ ID NO: 1620, respectively. In an aspect, the first gRNA molecule and the second gRNA molecule include targeting domains comprising, e.g., consisting of, SEQ ID NO: 1637 and SEQ ID NO: 1612, respectively. In an aspect, the first gRNA molecule and the second gRNA molecule include targeting domains comprising, e.g., consisting of, SEQ ID NO: 1637 and SEQ ID NO: 1656, respectively. In an aspect, the first gRNA molecule and the second gRNA molecule include targeting domains comprising, e.g., consisting of, SEQ ID NO: 1637 and SEQ ID NO: 1619, respectively. In an aspect, the first gRNA molecule and the second gRNA molecule include targeting domains comprising, e.g., consisting of, SEQ ID NO: 1637 and SEQ ID NO: 1675, respectively. In an aspect, the first gRNA molecule and the second gRNA molecule include targeting domains comprising, e.g., consisting of, SEQ ID NO: 1637 and SEQ ID NO: 1645, respectively. In an aspect, the first gRNA molecule and the second gRNA molecule include targeting domains comprising, e.g., consisting of, SEQ ID NO: 1637 and SEQ ID NO: 1598, respectively. In an aspect, the first gRNA molecule and the second gRNA molecule include targeting domains comprising, e.g., consisting of, SEQ ID NO: 1637 and SEQ ID NO: 1599, respectively. In an aspect, the first gRNA molecule and the second gRNA molecule include targeting domains comprising, e.g., consisting of, SEQ ID NO: 1637 and SEQ ID NO: 1663, respectively. In an aspect, the first gRNA molecule and the second gRNA molecule include targeting domains comprising, e.g., consisting of, SEQ ID NO: 1637 and SEQ ID NO: 1677, respectively. In an aspect, the first gRNA molecule and the second gRNA molecule include targeting domains comprising, e.g., consisting of, SEQ ID NO: 1637 and SEQ ID NO: 1626, respectively. In an aspect, the first gRNA molecule and the second gRNA molecule include targeting domains comprising, e.g., consisting of, SEQ ID NO: 1612 and SEQ ID NO: 1638, respectively. In an aspect, the first gRNA molecule and the second gRNA molecule include targeting domains comprising, e.g., consisting of, SEQ ID NO: 1612 and SEQ ID NO: 1647, respectively. In an aspect, the first gRNA molecule and the second gRNA molecule include targeting domains comprising, e.g., consisting of, SEQ ID NO: 1612 and SEQ ID NO: 1609, respectively. In an aspect, the first gRNA molecule and the second gRNA molecule include targeting domains comprising, e.g., consisting of, SEQ ID NO: 1612 and SEQ ID NO: 1621, respectively. In an aspect, the first gRNA molecule and the second gRNA molecule include targeting domains comprising, e.g., consisting of, SEQ ID NO: 1612 and SEQ ID NO: 1617, respectively. In an aspect, the first gRNA molecule and the second gRNA molecule include targeting domains comprising, e.g., consisting of, SEQ ID NO: 1612 and SEQ ID NO: 1654, respectively. In an aspect, the first gRNA molecule and the second gRNA molecule include targeting domains comprising, e.g., consisting of, SEQ ID NO: 1612 and SEQ ID NO: 1631, respectively. In an aspect, the first gRNA molecule and the second gRNA molecule include targeting domains comprising, e.g., consisting of, SEQ ID NO: 1612 and SEQ ID NO: 1620, respectively. In an aspect, the first gRNA molecule and the second gRNA molecule include targeting domains comprising, e.g., consisting of, SEQ ID NO: 1612 and SEQ ID NO: 1637, respectively. In an aspect, the first gRNA molecule and the second gRNA molecule include targeting domains comprising, e.g., consisting of, SEQ ID NO: 1612 and SEQ ID NO: 1656, respectively. In an aspect, the first gRNA molecule and the second gRNA molecule include targeting domains comprising, e.g., consisting of, SEQ ID NO: 1612 and SEQ ID NO: 1619, respectively. In an aspect, the first gRNA molecule and the second gRNA molecule include targeting domains comprising, e.g., consisting of, SEQ ID NO: 1612 and SEQ ID NO: 1675, respectively. In an aspect, the first gRNA molecule and the second gRNA molecule include targeting domains comprising, e.g., consisting of, SEQ ID NO: 1612 and SEQ ID NO: 1645, respectively. In an aspect, the first gRNA molecule and the second gRNA molecule include targeting domains comprising, e.g., consisting of, SEQ ID NO: 1612 and SEQ ID NO: 1598, respectively. In an aspect, the first gRNA molecule and the second gRNA molecule include targeting domains comprising, e.g., consisting of, SEQ ID NO: 1612 and SEQ ID NO: 1599, respectively. In an aspect, the first gRNA molecule and the second gRNA molecule include targeting domains comprising, e.g., consisting of, SEQ ID NO: 1612 and SEQ ID NO: 1663, respectively. In an aspect, the first gRNA molecule and the second gRNA molecule include targeting domains comprising, e.g., consisting of, SEQ ID NO: 1612 and SEQ ID NO: 1677, respectively. In an aspect, the first gRNA molecule and the second gRNA molecule include targeting domains comprising, e.g., consisting of, SEQ ID NO: 1612 and SEQ ID NO: 1626, respectively. In an aspect, the first gRNA molecule and the second gRNA molecule include targeting domains comprising, e.g., consisting of, SEQ ID NO: 1656 and SEQ ID NO: 1638, respectively. In an aspect, the first gRNA molecule and the second gRNA molecule include targeting domains comprising, e.g., consisting of, SEQ ID NO: 1656 and SEQ ID NO: 1647, respectively. In an aspect, the first gRNA molecule and the second gRNA molecule include targeting domains comprising, e.g., consisting of, SEQ ID NO: 1656 and SEQ ID NO: 1609, respectively. In an aspect, the first gRNA molecule and the second gRNA molecule include targeting domains comprising, e.g., consisting of, SEQ ID NO: 1656 and SEQ ID NO: 1621, respectively. In an aspect, the first gRNA molecule and the second gRNA molecule include targeting domains comprising, e.g., consisting of, SEQ ID NO: 1656 and SEQ ID NO: 1617, respectively. In an aspect, the first gRNA molecule and the second gRNA molecule include targeting domains comprising, e.g., consisting of, SEQ ID NO: 1656 and SEQ ID NO: 1654, respectively. In an aspect, the first gRNA molecule and the second gRNA molecule include targeting domains comprising, e.g., consisting of, SEQ ID NO: 1656 and SEQ ID NO: 1631, respectively. In an aspect, the first gRNA molecule and the second gRNA molecule include targeting domains comprising, e.g., consisting of, SEQ ID NO: 1656 and SEQ ID NO: 1620, respectively. In an aspect, the first gRNA molecule and the second gRNA molecule include targeting domains comprising, e.g., consisting of, SEQ ID NO: 1656 and SEQ ID NO: 1637, respectively. In an aspect, the first gRNA molecule and the second gRNA molecule include targeting domains comprising, e.g., consisting of, SEQ ID NO: 1656 and SEQ ID NO: 1612, respectively. In an aspect, the first gRNA molecule and the second gRNA molecule include targeting domains comprising, e.g., consisting of, SEQ ID NO: 1656 and SEQ ID NO: 1619, respectively. In an aspect, the first gRNA molecule and the second gRNA molecule include targeting domains comprising, e.g., consisting of, SEQ ID NO: 1656 and SEQ ID NO: 1675, respectively. In an aspect, the first gRNA molecule and the second gRNA molecule include targeting domains comprising, e.g., consisting of, SEQ ID NO: 1656 and SEQ ID NO: 1645, respectively. In an aspect, the first gRNA molecule and the second gRNA molecule include targeting domains comprising, e.g., consisting of, SEQ ID NO: 1656 and SEQ ID NO: 1598, respectively. In an aspect, the first gRNA molecule and the second gRNA molecule include targeting domains comprising, e.g., consisting of, SEQ ID NO: 1656 and SEQ ID NO: 1599, respectively. In an aspect, the first gRNA molecule and the second gRNA molecule include targeting domains comprising, e.g., consisting of, SEQ ID NO: 1656 and SEQ ID NO: 1663, respectively. In an aspect, the first gRNA molecule and the second gRNA molecule include targeting domains comprising, e.g., consisting of, SEQ ID NO: 1656 and SEQ ID NO: 1677, respectively. In an aspect, the first gRNA molecule and the second gRNA molecule include targeting domains comprising, e.g., consisting of, SEQ ID NO: 1656 and SEQ ID NO: 1626, respectively. In an aspect, the first gRNA molecule and the second gRNA molecule include targeting domains comprising, e.g., consisting of, SEQ ID NO: 1619 and SEQ ID NO: 1638, respectively. In an aspect, the first gRNA molecule and the second gRNA molecule include targeting domains comprising, e.g., consisting of, SEQ ID NO: 1619 and SEQ ID NO: 1647, respectively. In an aspect, the first gRNA molecule and the second gRNA molecule include targeting domains comprising, e.g., consisting of, SEQ ID NO: 1619 and SEQ ID NO: 1609, respectively. In an aspect, the first gRNA molecule and the second gRNA molecule include targeting domains comprising, e.g., consisting of, SEQ ID NO: 1619 and SEQ ID NO: 1621, respectively. In an aspect, the first gRNA molecule and the second gRNA molecule include targeting domains comprising, e.g., consisting of, SEQ ID NO: 1619 and SEQ ID NO: 1617, respectively. In an aspect, the first gRNA molecule and the second gRNA molecule include targeting domains comprising, e.g., consisting of, SEQ ID NO: 1619 and SEQ ID NO: 1654, respectively. In an aspect, the first gRNA molecule and the second gRNA molecule include targeting domains comprising, e.g., consisting of, SEQ ID NO: 1619 and SEQ ID NO: 1631, respectively. In an aspect, the first gRNA molecule and the second gRNA molecule include targeting domains comprising, e.g., consisting of, SEQ ID NO: 1619 and SEQ ID NO: 1620, respectively. In an aspect, the first gRNA molecule and the second gRNA molecule include targeting domains comprising, e.g., consisting of, SEQ ID NO: 1619 and SEQ ID NO: 1637, respectively. In an aspect, the first gRNA molecule and the second gRNA molecule include targeting domains comprising, e.g., consisting of, SEQ ID NO: 1619 and SEQ ID NO: 1612, respectively. In an aspect, the first gRNA molecule and the second gRNA molecule include targeting domains comprising, e.g., consisting of, SEQ ID NO: 1619 and SEQ ID NO: 1656, respectively. In an aspect, the first gRNA molecule and the second gRNA molecule include targeting domains comprising, e.g., consisting of, SEQ ID NO: 1619 and SEQ ID NO: 1675, respectively. In an aspect, the first gRNA molecule and the second gRNA molecule include targeting domains comprising, e.g., consisting of, SEQ ID NO: 1619 and SEQ ID NO: 1645, respectively. In an aspect, the first gRNA molecule and the second gRNA molecule include targeting domains comprising, e.g., consisting of, SEQ ID NO: 1619 and SEQ ID NO: 1598, respectively. In an aspect, the first gRNA molecule and the second gRNA molecule include targeting domains comprising, e.g., consisting of, SEQ ID NO: 1619 and SEQ ID NO: 1599, respectively. In an aspect, the first gRNA molecule and the second gRNA molecule include targeting domains comprising, e.g., consisting of, SEQ ID NO: 1619 and SEQ ID NO: 1663, respectively. In an aspect, the first gRNA molecule and the second gRNA molecule include targeting domains comprising, e.g., consisting of, SEQ ID NO: 1619 and SEQ ID NO: 1677, respectively. In an aspect, the first gRNA molecule and the second gRNA molecule include targeting domains comprising, e.g., consisting of, SEQ ID NO: 1619 and SEQ ID NO: 1626, respectively. In an aspect, the first gRNA molecule and the second gRNA molecule include targeting domains comprising, e.g., consisting of, SEQ ID NO: 1675 and SEQ ID NO: 1638, respectively. In an aspect, the first gRNA molecule and the second gRNA molecule include targeting domains comprising, e.g., consisting of, SEQ ID NO: 1675 and SEQ ID NO: 1647, respectively. In an aspect, the first gRNA molecule and the second gRNA molecule include targeting domains comprising, e.g., consisting of, SEQ ID NO: 1675 and SEQ ID NO: 1609, respectively. In an aspect, the first gRNA molecule and the second gRNA molecule include targeting domains comprising, e.g., consisting of, SEQ ID NO: 1675 and SEQ ID NO: 1621, respectively. In an aspect, the first gRNA molecule and the second gRNA molecule include targeting domains comprising, e.g., consisting of, SEQ ID NO: 1675 and SEQ ID NO: 1617, respectively. In an aspect, the first gRNA molecule and the second gRNA molecule include targeting domains comprising, e.g., consisting of, SEQ ID NO: 1675 and SEQ ID NO: 1654, respectively. In an aspect, the first gRNA molecule and the second gRNA molecule include targeting domains comprising, e.g., consisting of, SEQ ID NO: 1675 and SEQ ID NO: 1631, respectively. In an aspect, the first gRNA molecule and the second gRNA molecule include targeting domains comprising, e.g., consisting of, SEQ ID NO: 1675 and SEQ ID NO: 1620, respectively. In an aspect, the first gRNA molecule and the second gRNA molecule include targeting domains comprising, e.g., consisting of, SEQ ID NO: 1675 and SEQ ID NO: 1637, respectively. In an aspect, the first gRNA molecule and the second gRNA molecule include targeting domains comprising, e.g., consisting of, SEQ ID NO: 1675 and SEQ ID NO: 1612, respectively. In an aspect, the first gRNA molecule and the second gRNA molecule include targeting domains comprising, e.g., consisting of, SEQ ID NO: 1675 and SEQ ID NO: 1656, respectively. In an aspect, the first gRNA molecule and the second gRNA molecule include targeting domains comprising, e.g., consisting of, SEQ ID NO: 1675 and SEQ ID NO: 1619, respectively. In an aspect, the first gRNA molecule and the second gRNA molecule include targeting domains comprising, e.g., consisting of, SEQ ID NO: 1675 and SEQ ID NO: 1645, respectively. In an aspect, the first gRNA molecule and the second gRNA molecule include targeting domains comprising, e.g., consisting of, SEQ ID NO: 1675 and SEQ ID NO: 1598, respectively. In an aspect, the first gRNA molecule and the second gRNA molecule include targeting domains comprising, e.g., consisting of, SEQ ID NO: 1675 and SEQ ID NO: 1599, respectively. In an aspect, the first gRNA molecule and the second gRNA molecule include targeting domains comprising, e.g., consisting of, SEQ ID NO: 1675 and SEQ ID NO: 1663, respectively. In an aspect, the first gRNA molecule and the second gRNA molecule include targeting domains comprising, e.g., consisting of, SEQ ID NO: 1675 and SEQ ID NO: 1677, respectively. In an aspect, the first gRNA molecule and the second gRNA molecule include targeting domains comprising, e.g., consisting of, SEQ ID NO: 1675 and SEQ ID NO: 1626, respectively. In an aspect, the first gRNA molecule and the second gRNA molecule include targeting domains comprising, e.g., consisting of, SEQ ID NO: 1645 and SEQ ID NO: 1638, respectively. In an aspect, the first gRNA molecule and the second gRNA molecule include targeting domains comprising, e.g., consisting of, SEQ ID NO: 1645 and SEQ ID NO: 1647, respectively. In an aspect, the first gRNA molecule and the second gRNA molecule include targeting domains comprising, e.g., consisting of, SEQ ID NO: 1645 and SEQ ID NO: 1609, respectively. In an aspect, the first gRNA molecule and the second gRNA molecule include targeting domains comprising, e.g., consisting of, SEQ ID NO: 1645 and SEQ ID NO: 1621, respectively. In an aspect, the first gRNA molecule and the second gRNA molecule include targeting domains comprising, e.g., consisting of, SEQ ID NO: 1645 and SEQ ID NO: 1617, respectively. In an aspect, the first gRNA molecule and the second gRNA molecule include targeting domains comprising, e.g., consisting of, SEQ ID NO: 1645 and SEQ ID NO: 1654, respectively. In an aspect, the first gRNA molecule and the second gRNA molecule include targeting domains comprising, e.g., consisting of, SEQ ID NO: 1645 and SEQ ID NO: 1631, respectively. In an aspect, the first gRNA molecule and the second gRNA molecule include targeting domains comprising, e.g., consisting of, SEQ ID NO: 1645 and SEQ ID NO: 1620, respectively. In an aspect, the first gRNA molecule and the second gRNA molecule include targeting domains comprising, e.g., consisting of, SEQ ID NO: 1645 and SEQ ID NO: 1637, respectively. In an aspect, the first gRNA molecule and the second gRNA molecule include targeting domains comprising, e.g., consisting of, SEQ ID NO: 1645 and SEQ ID NO: 1612, respectively. In an aspect, the first gRNA molecule and the second gRNA molecule include targeting domains comprising, e.g., consisting of, SEQ ID NO: 1645 and SEQ ID NO: 1656, respectively. In an aspect, the first gRNA molecule and the second gRNA molecule include targeting domains comprising, e.g., consisting of, SEQ ID NO: 1645 and SEQ ID NO: 1619, respectively. In an aspect, the first gRNA molecule and the second gRNA molecule include targeting domains comprising, e.g., consisting of, SEQ ID NO: 1645 and SEQ ID NO: 1675, respectively. In an aspect, the first gRNA molecule and the second gRNA molecule include targeting domains comprising, e.g., consisting of, SEQ ID NO: 1598 and SEQ ID NO: 1638, respectively. In an aspect, the first gRNA molecule and the second gRNA molecule include targeting domains comprising, e.g., consisting of, SEQ ID NO: 1598 and SEQ ID NO: 1647, respectively. In an aspect, the first gRNA molecule and the second gRNA molecule include targeting domains comprising, e.g., consisting of, SEQ ID NO: 1598 and SEQ ID NO: 1609, respectively. In an aspect, the first gRNA molecule and the second gRNA molecule include targeting domains comprising, e.g., consisting of, SEQ ID NO: 1598 and SEQ ID NO: 1621, respectively. In an aspect, the first gRNA molecule and the second gRNA molecule include targeting domains comprising, e.g., consisting of, SEQ ID NO: 1598 and SEQ ID NO: 1617, respectively. In an aspect, the first gRNA molecule and the second gRNA molecule include targeting domains comprising, e.g., consisting of, SEQ ID NO: 1598 and SEQ ID NO: 1654, respectively. In an aspect, the first gRNA molecule and the second gRNA molecule include targeting domains comprising, e.g., consisting of, SEQ ID NO: 1598 and SEQ ID NO: 1631, respectively. In an aspect, the first gRNA molecule and the second gRNA molecule include targeting domains comprising, e.g., consisting of, SEQ ID NO: 1598 and SEQ ID NO: 1620, respectively. In an aspect, the first gRNA molecule and the second gRNA molecule include targeting domains comprising, e.g., consisting of, SEQ ID NO: 1598 and SEQ ID NO: 1637, respectively. In an aspect, the first gRNA molecule and the second gRNA molecule include targeting domains comprising, e.g., consisting of, SEQ ID NO: 1598 and SEQ ID NO: 1612, respectively. In an aspect, the first gRNA molecule and the second gRNA molecule include targeting domains comprising, e.g., consisting of, SEQ ID NO: 1598 and SEQ ID NO: 1656, respectively. In an aspect, the first gRNA molecule and the second gRNA molecule include targeting domains comprising, e.g., consisting of, SEQ ID NO: 1598 and SEQ ID NO: 1619, respectively. In an aspect, the first gRNA molecule and the second gRNA molecule include targeting domains comprising, e.g., consisting of, SEQ ID NO: 1598 and SEQ ID NO: 1675, respectively. In an aspect, the first gRNA molecule and the second gRNA molecule include targeting domains comprising, e.g., consisting of, SEQ ID NO: 1598 and SEQ ID NO: 1645, respectively. In an aspect, the first gRNA molecule and the second gRNA molecule include targeting domains comprising, e.g., consisting of, SEQ ID NO: 1598 and SEQ ID NO: 1599, respectively. In an aspect, the first gRNA molecule and the second gRNA molecule include targeting domains comprising, e.g., consisting of, SEQ ID NO: 1598 and SEQ ID NO: 1663, respectively. In an aspect, the first gRNA molecule and the second gRNA molecule include targeting domains comprising, e.g., consisting of, SEQ ID NO: 1598 and SEQ ID NO: 1677, respectively. In an aspect, the first gRNA molecule and the second gRNA molecule include targeting domains comprising, e.g., consisting of, SEQ ID NO: 1598 and SEQ ID NO: 1626, respectively. In an aspect, the first gRNA molecule and the second gRNA molecule include targeting domains comprising, e.g., consisting of, SEQ ID NO: 1599 and SEQ ID NO: 1638, respectively. In an aspect, the first gRNA molecule and the second gRNA molecule include targeting domains comprising, e.g., consisting of, SEQ ID NO: 1599 and SEQ ID NO: 1647, respectively. In an aspect, the first gRNA molecule and the second gRNA molecule include targeting domains comprising, e.g., consisting of, SEQ ID NO: 1599 and SEQ ID NO: 1609, respectively. In an aspect, the first gRNA molecule and the second gRNA molecule include targeting domains comprising, e.g., consisting of, SEQ ID NO: 1599 and SEQ ID NO: 1621, respectively. In an aspect, the first gRNA molecule and the second gRNA molecule include targeting domains comprising, e.g., consisting of, SEQ ID NO: 1599 and SEQ ID NO: 1617, respectively. In an aspect, the first gRNA molecule and the second gRNA molecule include targeting domains comprising, e.g., consisting of, SEQ ID NO: 1599 and SEQ ID NO: 1654, respectively. In an aspect, the first gRNA molecule and the second gRNA molecule include targeting domains comprising, e.g., consisting of, SEQ ID NO: 1599 and SEQ ID NO: 1631, respectively. In an aspect, the first gRNA molecule and the second gRNA molecule include targeting domains comprising, e.g., consisting of, SEQ ID NO: 1599 and SEQ ID NO: 1620, respectively. In an aspect, the first gRNA molecule and the second gRNA molecule include targeting domains comprising, e.g., consisting of, SEQ ID NO: 1599 and SEQ ID NO: 1637, respectively. In an aspect, the first gRNA molecule and the second gRNA molecule include targeting domains comprising, e.g., consisting of, SEQ ID NO: 1599 and SEQ ID NO: 1612, respectively. In an aspect, the first gRNA molecule and the second gRNA molecule include targeting domains comprising, e.g., consisting of, SEQ ID NO: 1599 and SEQ ID NO: 1656, respectively. In an aspect, the first gRNA molecule and the second gRNA molecule include targeting domains comprising, e.g., consisting of, SEQ ID NO: 1599 and SEQ ID NO: 1619, respectively. In an aspect, the first gRNA molecule and the second gRNA molecule include targeting domains comprising, e.g., consisting of, SEQ ID NO: 1599 and SEQ ID NO: 1675, respectively. In an aspect, the first gRNA molecule and the second gRNA molecule include targeting domains comprising, e.g., consisting of, SEQ ID NO: 1599 and SEQ ID NO: 1645, respectively. In an aspect, the first gRNA molecule and the second gRNA molecule include targeting domains comprising, e.g., consisting of, SEQ ID NO: 1599 and SEQ ID NO: 1598, respectively. In an aspect, the first gRNA molecule and the second gRNA molecule include targeting domains comprising, e.g., consisting of, SEQ ID NO: 1599 and SEQ ID NO: 1663, respectively. In an aspect, the first gRNA molecule and the second gRNA molecule include targeting domains comprising, e.g., consisting of, SEQ ID NO: 1599 and SEQ ID NO: 1677, respectively. In an aspect, the first gRNA molecule and the second gRNA molecule include targeting domains comprising, e.g., consisting of, SEQ ID NO: 1599 and SEQ ID NO: 1626, respectively. In an aspect, the first gRNA molecule and the second gRNA molecule include targeting domains comprising, e.g., consisting of, SEQ ID NO: 1663 and SEQ ID NO: 1638, respectively. In an aspect, the first gRNA molecule and the second gRNA molecule include targeting domains comprising, e.g., consisting of, SEQ ID NO: 1663 and SEQ ID NO: 1647, respectively. In an aspect, the first gRNA molecule and the second gRNA molecule include targeting domains comprising, e.g., consisting of, SEQ ID NO: 1663 and SEQ ID NO: 1609, respectively. In an aspect, the first gRNA molecule and the second gRNA molecule include targeting domains comprising, e.g., consisting of, SEQ ID NO: 1663 and SEQ ID NO: 1621, respectively. In an aspect, the first gRNA molecule and the second gRNA molecule include targeting domains comprising, e.g., consisting of, SEQ ID NO: 1663 and SEQ ID NO: 1617, respectively. In an aspect, the first gRNA molecule and the second gRNA molecule include targeting domains comprising, e.g., consisting of, SEQ ID NO: 1663 and SEQ ID NO: 1654, respectively. In an aspect, the first gRNA molecule and the second gRNA molecule include targeting domains comprising, e.g., consisting of, SEQ ID NO: 1663 and SEQ ID NO: 1631, respectively. In an aspect, the first gRNA molecule and the second gRNA molecule include targeting domains comprising, e.g., consisting of, SEQ ID NO: 1663 and SEQ ID NO: 1620, respectively. In an aspect, the first gRNA molecule and the second gRNA molecule include targeting domains comprising, e.g., consisting of, SEQ ID NO: 1663 and SEQ ID NO: 1637, respectively. In an aspect, the first gRNA molecule and the second gRNA molecule include targeting domains comprising, e.g., consisting of, SEQ ID NO: 1663 and SEQ ID NO: 1612, respectively. In an aspect, the first gRNA molecule and the second gRNA molecule include targeting domains comprising, e.g., consisting of, SEQ ID NO: 1663 and SEQ ID NO: 1656, respectively. In an aspect, the first gRNA molecule and the second gRNA molecule include targeting domains comprising, e.g., consisting of, SEQ ID NO: 1663 and SEQ ID NO: 1619, respectively. In an aspect, the first gRNA molecule and the second gRNA molecule include targeting domains comprising, e.g., consisting of, SEQ ID NO: 1663 and SEQ ID NO: 1675, respectively. In an aspect, the first gRNA molecule and the second gRNA molecule include targeting domains comprising, e.g., consisting of, SEQ ID NO: 1663 and SEQ ID NO: 1645, respectively. In an aspect, the first gRNA molecule and the second gRNA molecule include targeting domains comprising, e.g., consisting of, SEQ ID NO: 1663 and SEQ ID NO: 1598, respectively. In an aspect, the first gRNA molecule and the second gRNA molecule include targeting domains comprising, e.g., consisting of, SEQ ID NO: 1663 and SEQ ID NO: 1599, respectively. In an aspect, the first gRNA molecule and the second gRNA molecule include targeting domains comprising, e.g., consisting of, SEQ ID NO: 1663 and SEQ ID NO: 1677, respectively. In an aspect, the first gRNA molecule and the second gRNA molecule include targeting domains comprising, e.g., consisting of, SEQ ID NO: 1663 and SEQ ID NO: 1626, respectively. In an aspect, the first gRNA molecule and the second gRNA molecule include targeting domains comprising, e.g., consisting of, SEQ ID NO: 1677 and SEQ ID NO: 1638, respectively. In an aspect, the first gRNA molecule and the second gRNA molecule include targeting domains comprising, e.g., consisting of, SEQ ID NO: 1677 and SEQ ID NO: 1647, respectively. In an aspect, the first gRNA molecule and the second gRNA molecule include targeting domains comprising, e.g., consisting of, SEQ ID NO: 1677 and SEQ ID NO: 1609, respectively. In an aspect, the first gRNA molecule and the second gRNA molecule include targeting domains comprising, e.g., consisting of, SEQ ID NO: 1677 and SEQ ID NO: 1621, respectively. In an aspect, the first gRNA molecule and the second gRNA molecule include targeting domains comprising, e.g., consisting of, SEQ ID NO: 1677 and SEQ ID NO: 1617, respectively. In an aspect, the first gRNA molecule and the second gRNA molecule include targeting domains comprising, e.g., consisting of, SEQ ID NO: 1677 and SEQ ID NO: 1654, respectively. In an aspect, the first gRNA molecule and the second gRNA molecule include targeting domains comprising, e.g., consisting of, SEQ ID NO: 1677 and SEQ ID NO: 1631, respectively. In an aspect, the first gRNA molecule and the second gRNA molecule include targeting domains comprising, e.g., consisting of, SEQ ID NO: 1677 and SEQ ID NO: 1620, respectively. In an aspect, the first gRNA molecule and the second gRNA molecule include targeting domains comprising, e.g., consisting of, SEQ ID NO: 1677 and SEQ ID NO: 1637, respectively. In an aspect, the first gRNA molecule and the second gRNA molecule include targeting domains comprising, e.g., consisting of, SEQ ID NO: 1677 and SEQ ID NO: 1612, respectively. In an aspect, the first gRNA molecule and the second gRNA molecule include targeting domains comprising, e.g., consisting of, SEQ ID NO: 1677 and SEQ ID NO: 1656, respectively. In an aspect, the first gRNA molecule and the second gRNA molecule include targeting domains comprising, e.g., consisting of, SEQ ID NO: 1677 and SEQ ID NO: 1619, respectively. In an aspect, the first gRNA molecule and the second gRNA molecule include targeting domains comprising, e.g., consisting of, SEQ ID NO: 1677 and SEQ ID NO: 1675, respectively. In an aspect, the first gRNA molecule and the second gRNA molecule include targeting domains comprising, e.g., consisting of, SEQ ID NO: 1677 and SEQ ID NO: 1645, respectively. In an aspect, the first gRNA molecule and the second gRNA molecule include targeting domains comprising, e.g., consisting of, SEQ ID NO: 1677 and SEQ ID NO: 1598, respectively. In an aspect, the first gRNA molecule and the second gRNA molecule include targeting domains comprising, e.g., consisting of, SEQ ID NO: 1677 and SEQ ID NO: 1599, respectively. In an aspect, the first gRNA molecule and the second gRNA molecule include targeting domains comprising, e.g., consisting of, SEQ ID NO: 1677 and SEQ ID NO: 1663, respectively. In an aspect, the first gRNA molecule and the second gRNA molecule include targeting domains comprising, e.g., consisting of, SEQ ID NO: 1677 and SEQ ID NO: 1626, respectively. In an aspect, the first gRNA molecule and the second gRNA molecule include targeting domains comprising, e.g., consisting of, SEQ ID NO: 1626 and SEQ ID NO: 1638, respectively. In an aspect, the first gRNA molecule and the second gRNA molecule include targeting domains comprising, e.g., consisting of, SEQ ID NO: 1626 and SEQ ID NO: 1647, respectively. In an aspect, the first gRNA molecule and the second gRNA molecule include targeting domains comprising, e.g., consisting of, SEQ ID NO: 1626 and SEQ ID NO: 1609, respectively. In an aspect, the first gRNA molecule and the second gRNA molecule include targeting domains comprising, e.g., consisting of, SEQ ID NO: 1626 and SEQ ID NO: 1621, respectively. In an aspect, the first gRNA molecule and the second gRNA molecule include targeting domains comprising, e.g., consisting of, SEQ ID NO: 1626 and SEQ ID NO: 1617, respectively. In an aspect, the first gRNA molecule and the second gRNA molecule include targeting domains comprising, e.g., consisting of, SEQ ID NO: 1626 and SEQ ID NO: 1654, respectively. In an aspect, the first gRNA molecule and the second gRNA molecule include targeting domains comprising, e.g., consisting of, SEQ ID NO: 1626 and SEQ ID NO: 1631, respectively. In an aspect, the first gRNA molecule and the second gRNA molecule include targeting domains comprising, e.g., consisting of, SEQ ID NO: 1626 and SEQ ID NO: 1620, respectively. In an aspect, the first gRNA molecule and the second gRNA molecule include targeting domains comprising, e.g., consisting of, SEQ ID NO: 1626 and SEQ ID NO: 1637, respectively. In an aspect, the first gRNA molecule and the second gRNA molecule include targeting domains comprising, e.g., consisting of, SEQ ID NO: 1626 and SEQ ID NO: 1612, respectively. In an aspect, the first gRNA molecule and the second gRNA molecule include targeting domains comprising, e.g., consisting of, SEQ ID NO: 1626 and SEQ ID NO: 1656, respectively. In an aspect, the first gRNA molecule and the second gRNA molecule include targeting domains comprising, e.g., consisting of, SEQ ID NO: 1626 and SEQ ID NO: 1619, respectively. In an aspect, the first gRNA molecule and the second gRNA molecule include targeting domains comprising, e.g., consisting of, SEQ ID NO: 1626 and SEQ ID NO: 1675, respectively. In an aspect, the first gRNA molecule and the second gRNA molecule include targeting domains comprising, e.g., consisting of, SEQ ID NO: 1626 and SEQ ID NO: 1645, respectively. In an aspect, the first gRNA molecule and the second gRNA molecule include targeting domains comprising, e.g., consisting of, SEQ ID NO: 1626 and SEQ ID NO: 1598, respectively. In an aspect, the first gRNA molecule and the second gRNA molecule include targeting domains comprising, e.g., consisting of, SEQ ID NO: 1626 and SEQ ID NO: 1599, respectively. In an aspect, the first gRNA molecule and the second gRNA molecule include targeting domains comprising, e.g., consisting of, SEQ ID NO: 1626 and SEQ ID NO: 1663, respectively. In an aspect, the first gRNA molecule and the second gRNA molecule include targeting domains comprising, e.g., consisting of, SEQ ID NO: 1626 and SEQ ID NO: 1677, respectively.

### III. Methods for Designing gRNAs

[0363] Methods for designing gRNAs are described herein, including methods for selecting, designing and validating target sequences. Exemplary targeting domains are also provided herein. Targeting Domains discussed herein can be incorporated into the gRNAs described herein.

[0364] Methods for selection and validation of target sequences as well as off-target analyses are described, e.g., in. Mali el al., 2013 SCIENCE 339(6121): 823-826; Hsu et al, 2013 NAT BIOTECHNOL, 31 (9): 827-32; Fu et al, 2014 NAT BIOTECHNOL, doi: 10.1038/nbt.2808. PubMed PM ID: 24463574; Heigwer et al, 2014 NAT METHODS 11(2): 122-3. doi: 10.1038/nmeth.2812. PubMed PMID: 24481216; Bae el al, 2014 BIOINFORMATICS PubMed PMID: 24463181; Xiao A el al, 2014 BIOINFORMATICS PubMed PMID: 24389662.

[0365] For example, a software tool can be used to optimize the choice of gRNA within a user's target sequence, e.g., to minimize total off-target activity across the genome. Off target activity may be other than cleavage. For each possible gRNA choice e.g., using S. pyogenes Cas9, the tool can identify all off-target sequences (e.g., preceding either NAG or NGG PAMs) across the genome that contain up to certain number (e.g., 1, 2, 3, 4, 5, 6, 7, 8, 9, or 10) of mismatched base-pairs. The cleavage efficiency at each off-target sequence can be predicted, e.g., using an experimentally-derived weighting scheme. Each possible gRNA is then ranked according to its total predicted off-target cleavage; the top-ranked gRNAs represent those that are likely to have the greatest on-target and the least off-target cleavage. Other functions, e.g., automated reagent design for CRISPR construction, primer design for the on-target Surveyor assay, and primer design for high-throughput detection and quantification of off-target cleavage via next-gen sequencing, can also be included in the tool. Candidate gRNA molecules can be evaluated by art-known methods or as described herein.

[0366] Although software algorithms may be used to generate an initial list of potential gRNA molecules, cutting efficiency and specificity will not necessarily reflect the predicted values, and gRNA molecules typically require screening in specific cell lines, e.g., primary human cell lines, e.g., human HSPCs, e.g., human CD34+ cells, to determine, for example, cutting efficiency, indel formation, cutting specificity and change in desired phenotype. These properties may be assayed by the methods described herein.

[0367] In aspects of the invention, a gRNA comprising the targeting domain of CR00312 (SEQ ID NO: 248, underlined below), e.g., one of the gRNA molecules described below, is useful in the CRISPR systems, methods, cells and other aspects and embodiments of the invention, including in aspects involving more than one gRNA molecule, e.g., described herein:

sgRNA CR00312 #1:

(SEQ ID NO: 342)

GUUUGGCCUCUGAUUAGGGUGUUUUAGAGCUAGAAAUAGCAAGUUAAAAU
AAGGCUAGUCCGUUAUCAACUUGAAAAAGUGGCACCGAGUCGGUGCUUUU
sgRNA CR00312 #2:

(SEQ ID NO: 343)

mG*mU*mU*UGGCCUCUGAUUAGGGUGUUUUAGAGCUAGAAAUAGCAAGU
UAAAAUAAGGCUAGUCCGUUAUCAACUUGAAAAAGUGGCACCGAGUCGGU
GCU*mU*mU*mU
sgRNA CR00312 #3:

(SEQ ID NO: 1762))

mG*mU*mU*UGGCCUCUGAUUAGGGUGUUUUAGAGCUAGAAAUAGCAAGU
UAAAAUAAGGCUAGUCCGUUAUCAACUUGAAAAAGUGGCACCGAGUCGGU
GCmU*mU*mU*U
dgRNA CR00312 #1:
crRNA:

(SEQ ID NO: 344)

GUUUGGCCUCUGAUUAGGGUGUUUUAGAGCUAUGCUGUUUUG
tracr:

(SEQ ID NO: 6660)

AACAGCAUAGCAAGUUAAAAUAAGGCUAGUCCGUUAUCAACUUGAAAAAG
UGGCACCGAGUCGGUGCUUUUUUU
dgRNA CR00312 #2:
crRNA:

(SEQ ID NO: 345)

mG*mU*mU*UGGCCUCUGAUUAGGGUGUUUUAGAGCUAUGCUGUU*mU*m
U*mG
tracr:

(SEQ ID NO: 346)

mA*mA*mC*AGCAUAGCAAGUUAAAAUAAGGCUAGUCCGUUAUCAACUUG
AAAAAGUGGCACCGAGUCGGUGCUUUU*mU*mU*mU
dgRNA CR00312 #3:
crRNA:

(SEQ ID NO: 345)

mG*mU*mU*UGGCCUCUGAUUAGGGUGUUUUAGAGCUAUGCUGUU*mU*m
U*mG
tracr:

(SEQ ID NO: 6660)

AACAGCAUAGCAAGUUAAAAUAAGGCUAGUCCGUUAUCAACUUGAAAAAG
UGGCACCGAGUCGGUGCUUUUUUU.

[0368] In aspects of the invention, a gRNA comprising the targeting domain of CR001128 (SEQ ID NO: 338, underlined below), e.g., one of the gRNA molecules described below, is useful in the CRISPR systems, methods, cells and other aspects and embodiments of the invention, including in aspects involving more than one gRNA molecule, e.g., described herein:

sgRNA CR001128 #1:

(SEQ ID NO: 347)

AUCAGAGGCCAAACCCUUCCGUUUUAGAGCUAGAAAUAGCAAGUUAAAAU
AAGGCUAGUCCGUUAUCAACUUGAAAAAGUGGCACCGAGUCGGUGCUUUU
sgRNA CR001128 #2:

(SEQ ID NO: 348)

mA*mU*mC*AGAGGCCAAACCCUUCCGUUUUAGAGCUAGAAAUAGCAAGU
UAAAAUAAGGCUAGUCCGUUAUCAACUUGAAAAAGUGGCACCGAGUCGGU
GCU*mU*mU*mU
sgRNA CR001128 #3:

(SEQ ID NO: 1763)

mA*mU*mC*AGAGGCCAAACCCUUCCGUUUUAGAGCUAGAAAUAGCAAGU
UAAAAUAAGGCUAGUCCGUUAUCAACUUGAAAAAGUGGCACCGAGUCGGU
GCmU*mU*mU*U
dgRNA CR001128 #1:
crRNA:

(SEQ ID NO: 349)

AUCAGAGGCCAAACCCUUCCGUUUUAGAGCUAUGCUGUUUUG
tracr:

(SEQ ID NO: 6660)

AACAGCAUAGCAAGUUAAAAUAAGGCUAGUCCGUUAUCAACUUGAAAAAG
UGGCACCGAGUCGGUGCUUUUUUU
dgRNA CR001128 #2:
crRNA:

(SEQ ID NO: 350)

mA*mU*mC*AGAGGCCAAACCCUUCCGUUUUAGAGCUAUGCUGUU*mU*m
U*mG
tracr:

(SEQ ID NO: 346)

mA*mA*mC*AGCAUAGCAAGUUAAAAUAAGGCUAGUCCGUUAUCAACUUG
AAAAAGUGGCACCGAGUCGGUGCUUUU*mU*mU*mU
dgRNA CR001128 #3:
crRNA:

(SEQ ID NO: 350)

mA*mU*mC*AGAGGCCAAACCCUUCCGUUUUAGAGCUAUGCUGUU*mU*m
U*mG
tracr:

(SEQ ID NO: 6660)

AACAGCAUAGCAAGUUAAAAUAAGGCUAGUCCGUUAUCAACUUGAAAAAG
UGGCACCGAGUCGGUGCUUUUUUU.

[0369] In aspects of the invention, a gRNA comprising the targeting domain of CR001126 (SEQ ID NO: 336, underlined below), e.g., one of the gRNA molecules described below, is useful in the CRISPR systems, methods, cells and other aspects and embodiments of the invention, including in aspects involving more than one gRNA molecule, e.g., described herein:

sgRNA CR001126 #1:

(SEQ ID NO: 351)

UUUAUCACAGGCUCCAGGAAGUUUUAGAGCUAGAAAUAGCAAGUUAAAAU
AAGGCUAGUCCGUUAUCAACUUGAAAAAGUGGCACCGAGUCGGUGCUUUU
sgRNA CR001126 #2:

(SEQ ID NO: 352)

mU*mU*mU*AUCACAGGCUCCAGGAAGUUUUAGAGCUAGAAAUAGCAAGU
UAAAAUAAGGCUAGUCCGUUAUCAACUUGAAAAAGUGGCACCGAGUCGGU
GCU*mU*mU*mU
sgRNA CR001126 #3:

(SEQ ID NO: 1764)

mU*mU*mU*AUCACAGGCUCCAGGAAGUUUUAGAGCUAGAAAUAGCAAGU
UAAAAUAAGGCUAGUCCGUUAUCAACUUGAAAAAGUGGCACCGAGUCGGU
GCmU*mU*mU*U
dgRNA CR001126 #1:
crRNA:

(SEQ ID NO: 353)

UUUAUCACAGGCUCCAGGAAGUUUUAGAGCUAUGCUGUUUUG
tracr:

(SEQ ID NO: 6660)

AACAGCAUAGCAAGUUAAAAUAAGGCUAGUCCGUUAUCAACUUGAAAAAG
UGGCACCGAGUCGGUGCUUUUUUU
dgRNA CR001126 #2:
crRNA:

(SEQ ID NO: 354)

mU*mU*mU*AUCACAGGCUCCAGGAAGUUUUAGAGCUAUGCUGUU*mU*m
U*mG
tracr:

(SEQ ID NO: 346)

mA*mA*mC*AGCAUAGCAAGUUAAAAUAAGGCUAGUCCGUUAUCAACUUG
AAAAAGUGGCACCGAGUCGGUGCUUUU*mU*mU*mU
dgRNA CR001126 #3:
crRNA:

(SEQ ID NO: 354)

mU*mU*mU*AUCACAGGCUCCAGGAAGUUUUAGAGCUAUGCUGUU*mU*m
U*mG
tracr:

(SEQ ID NO: 6660)

AACAGCAUAGCAAGUUAAAAUAAGGCUAGUCCGUUAUCAACUUGAAAAAG
UGGCACCGAGUCGGUGCUUUUUUU.

[0370] In aspects of the invention, a gRNA comprising the targeting domain of CR00311 (SEQ ID NO: 247, underlined below), e.g., one of the gRNA molecules described below, is useful in the CRISPR systems, methods, cells and other aspects and embodiments of the invention, including in aspects involving more than one gRNA molecule, e.g., described herein:

sgRNA CR00311 #1:

(SEQ ID NO: 355)

UUUGGCCUCUGAUUAGGGUGGUUUUAGAGCUAGAAAUAGCAAGUUAAAAU
AAGGCUAGUCCGUUAUCAACUUGAAAAAGUGGCACCGAGUCGGUGCUUUU
sgRNA CR00311 #2:

(SEQ ID NO: 356)

mU*mU*mU*GGCCUCUGAUUAGGGUGGUUUUAGAGCUAGAAAUAGCAAGU
UAAAAUAAGGCUAGUCCGUUAUCAACUUGAAAAAGUGGCACCGAGUCGGU
GCU*mU*mU*mU
sgRNA CR00311 #3:

(SEQ ID NO: 1765)

mU*mU*mU*GGCCUCUGAUUAGGGUGGUUUUAGAGCUAGAAAUAGCAAGU
UAAAAUAAGGCUAGUCCGUUAUCAACUUGAAAAAGUGGCACCGAGUCGGU
GCmU*mU*mU*U
dgRNA CR00311 #1:
crRNA:

(SEQ ID NO: 357)

UUUGGCCUCUGAUUAGGGUGGUUUUAGAGCUAUGCUGUUUUG
tracr:

(SEQ ID NO: 6660)

AACAGCAUAGCAAGUUAAAAUAAGGCUAGUCCGUUAUCAACUUGAAAAAG
UGGCACCGAGUCGGUGCUUUUUUU
dgRNA CR00311 #2:
crRNA:

(SEQ ID NO: 358)

mU*mU*mU*GGCCUCUGAUUAGGGUGGUUUUAGAGCUAUGCUGUU*mU*m
U*mG
tracr:

(SEQ ID NO: 346)

mA*mA*mC*AGCAUAGCAAGUUAAAAUAAGGCUAGUCCGUUAUCAACUUG
AAAAAGUGGCACCGAGUCGGUGCUUUU*mU*mU*mU
dgRNA CR00311 #3:
crRNA:

(SEQ ID NO: 358)

mU*mU*mU*GGCCUCUGAUUAGGGUGGUUUUAGAGCUAUGCUGUU*mU*m
U*mG
tracr:

(SEQ ID NO: 6660)

AACAGCAUAGCAAGUUAAAAUAAGGCUAGUCCGUUAUCAACUUGAAAAAG
UGGCACCGAGUCGGUGCUUUUUUU.

[0371] In aspects of the invention, a gRNA comprising the targeting domain of CR00309 (SEQ ID NO: 245, underlined below), e.g., one of the gRNA molecules described below, is useful in the CRISPR systems, methods, cells and other aspects and embodiments of the invention, including in aspects involving more than one gRNA molecule, e.g., described herein:

sgRNA CR00309 #1:

(SEQ ID NO: 359)

CACGCCCCCACCCUAAUCAGGUUUUAGAGCUAGAAAUAGCAAGUUAAAAU
AAGGCUAGUCCGUUAUCAACUUGAAAAAGUGGCACCGAGUCGGUGCUUUU
sgRNA CR00309 #2:

(SEQ ID NO: 360)

mC*mA*mC*GCCCCCACCCUAAUCAGGUUUUAGAGCUAGAAAUAGCAAGU
UAAAAUAAGGCUAGUCCGUUAUCAACUUGAAAAAGUGGCACCGAGUCGGU
GCU*mU*mU*mU
sgRNA CR00309 #3:

(SEQ ID NO: 1766)

mC*mA*mC*GCCCCCACCCUAAUCAGGUUUUAGAGCUAGAAAUAGCAAGU
UAAAAUAAGGCUAGUCCGUUAUCAACUUGAAAAAGUGGCACCGAGUCGGU
GCmU*mU*mU*U
dgRNA CR00309 #1:
crRNA:

(SEQ ID NO: 361)

CACGCCCCCACCCUAAUCAGGUUUUAGAGCUAUGCUGUUUUG
tracr:

(SEQ ID NO: 6660)

AACAGCAUAGCAAGUUAAAAUAAGGCUAGUCCGUUAUCAACUUGAAAAAG
UGGCACCGAGUCGGUGCUUUUUUU
dgRNA CR00309 #2:
crRNA:

(SEQ ID NO: 362)

mC*mA*mC*GCCCCCACCCUAAUCAGGUUUUAGAGCUAUGCUGUU*mU*m
U*mG
tracr:

(SEQ ID NO: 346)

mA*mA*mC*AGCAUAGCAAGUUAAAAUAAGGCUAGUCCGUUAUCAACUUG
AAAAAGUGGCACCGAGUCGGUGCUUUU*mU*mU*mU
dgRNA CR00309 #3:
crRNA:

(SEQ ID NO: 362)

mC*mA*mC*GCCCCCACCCUAAUCAGGUUUUAGAGCUAUGCUGUU*mU*m
U*mG
tracr:

(SEQ ID NO: 6660)

AACAGCAUAGCAAGUUAAAAUAAGGCUAGUCCGUUAUCAACUUGAAAAAG
UGGCACCGAGUCGGUGCUUUUUUU.

[0372] In aspects of the invention, a gRNA comprising the targeting domain of CR001127 (SEQ ID NO: 337, underlined below), e.g., one of the gRNA molecules described below, is useful in the CRISPR systems, methods, cells and other aspects and embodiments of the invention, including in aspects involving more than one gRNA molecule, e.g., described herein:

sgRNA CR001127 #1:

(SEQ ID NO: 363)

CACAGGCUCCAGGAAGGGUUGUUUUAGAGCUAGAAAUAGCAAGUUAAAAU
AAGGCUAGUCCGUUAUCAACUUGAAAAAGUGGCACCGAGUCGGUGCUUUU
sgRNA CR001127 #2:

(SEQ ID NO: 364)

mC*mA*mC*AGGCUCCAGGAAGGGUUGUUUUAGAGCUAGAAAUAGCAAGU
UAAAAUAAGGCUAGUCCGUUAUCAACUUGAAAAAGUGGCACCGAGUCGGU
GCU*mU*mU*mU
sgRNA CR001127 #3:

(SEQ ID NO: 1767)

mC*mA*mC*AGGCUCCAGGAAGGGUUGUUUUAGAGCUAGAAAUAGCAAGU
UAAAAUAAGGCUAGUCCGUUAUCAACUUGAAAAAGUGGCACCGAGUCGGU
GCmU*mU*mU*U
dgRNA CR001127 #1:
crRNA:

(SEQ ID NO: 365)

CACAGGCUCCAGGAAGGGUUGUUUUAGAGCUAUGCUGUUUUG
tracr:

(SEQ ID NO: 6660)

AACAGCAUAGCAAGUUAAAAUAAGGCUAGUCCGUUAUCAACUUGAAAAAG
UGGCACCGAGUCGGUGCUUUUUUU
dgRNA CR001127 #2:
crRNA:

(SEQ ID NO: 366)

mC*mA*mC*AGGCUCCAGGAAGGGUUGUUUUAGAGCUAUGCUGUU*mU*m
U*mG
tracr:

(SEQ ID NO: 346)

mA*mA*mC*AGCAUAGCAAGUUAAAAUAAGGCUAGUCCGUUAUCAACUUG
AAAAAGUGGCACCGAGUCGGUGCUUUU*mU*mU*mU
dgRNA CR001127 #3:
crRNA:

(SEQ ID NO: 366)

mC*mA*mC*AGGCUCCAGGAAGGGUUGUUUUAGAGCUAUGCUGUU*mU*m
U*mG
tracr:

(SEQ ID NO: 6660)

AACAGCAUAGCAAGUUAAAAUAAGGCUAGUCCGUUAUCAACUUGAAAAAG
UGGCACCGAGUCGGUGCUUUUUUU.

[0373] In aspects of the invention, a gRNA comprising the targeting domain of CR00316 (SEQ ID NO: 252, underlined below), e.g., one of the gRNA molecules described below, is useful in the CRISPR systems, methods, cells and other aspects and embodiments of the invention, including in aspects involving more than one gRNA molecule, e.g., described herein:

sgRNA CR00316 #1:

(SEQ ID NO: 367)

UUGCUUUUAUCACAGGCUCCGUUUUAGAGCUAGAAAUAGCAAGUUAAAAU
AAGGCUAGUCCGUUAUCAACUUGAAAAAGUGGCACCGAGUCGGUGCUUUU
sgRNA CR00316 #2:

(SEQ ID NO: 368)

mU*mU*mG*CUUUUAUCACAGGCUCCGUUUUAGAGCUAGAAAUAGCAAGU
UAAAAUAAGGCUAGUCCGUUAUCAACUUGAAAAAGUGGCACCGAGUCGGU
GCU*mU*mU*mU
sgRNA CR00316 #3:

(SEQ ID NO: 1768)

mU*mU*mG*CUUUUAUCACAGGCUCCGUUUUAGAGCUAGAAAUAGCAAGU
UAAAAUAAGGCUAGUCCGUUAUCAACUUGAAAAAGUGGCACCGAGUCGGU
GCmU*mU*mU*U
dgRNA CR00316 #1:
crRNA:

(SEQ ID NO: 369)

UUGCUUUUAUCACAGGCUCCGUUUUAGAGCUAUGCUGUUUUG
tracr:

(SEQ ID NO: 6660)

AACAGCAUAGCAAGUUAAAAUAAGGCUAGUCCGUUAUCAACUUGAAAAAG
UGGCACCGAGUCGGUGCUUUUUUU
dgRNA CR00316 #2:
crRNA:

(SEQ ID NO: 370)

mU*mU*mG*CUUUUAUCACAGGCUCCGUUUUAGAGCUAUGCUGUU*mU*m
U*mG
tracr:

(SEQ ID NO: 346)

mA*mA*mC*AGCAUAGCAAGUUAAAAUAAGGCUAGUCCGUUAUCAACUUG
AAAAAGUGGCACCGAGUCGGUGCUUUU*mU*mU*mU
dgRNA CR00316 #3:
crRNA:

(SEQ ID NO: 370)

mU*mU*mG*CUUUUAUCACAGGCUCCGUUUUAGAGCUAUGCUGUU*mU*m
U*mG
tracr:

(SEQ ID NO: 6660)

AACAGCAUAGCAAGUUAAAAUAAGGCUAGUCCGUUAUCAACUUGAAAAAG
UGGCACCGAGUCGGUGCUUUUUUU.

[0374] In aspects of the invention, a gRNA comprising the targeting domain of CR001125 (SEQ ID NO: 335, underlined below), e.g., one of the gRNA molecules described below, is useful in the CRISPR systems, methods, cells and other aspects and embodiments of the invention, including in aspects involving more than one gRNA molecule, e.g., described herein:

sgRNA CR001125 #1:

(SEQ ID NO: 371)

UUUUAUCACAGGCUCCAGGAGUUUUAGAGCUAGAAAUAGCAAGUUAAAAU
AAGGCUAGUCCGUUAUCAACUUGAAAAAGUGGCACCGAGUCGGUGCUUUU
sgRNA CR001125 #2:

(SEQ ID NO: 372)

mU*mU*mU*UAUCACAGGCUCCAGGAGUUUUAGAGCUAGAAAUAGCAAGU
UAAAAUAAGGCUAGUCCGUUAUCAACUUGAAAAAGUGGCACCGAGUCGGU
GCU*mU*mU*mU
sgRNA CR001125 #3:

(SEQ ID NO: 1769)

mU*mU*mU*UAUCACAGGCUCCAGGAGUUUUAGAGCUAGAAAUAGCAAGU
UAAAAUAAGGCUAGUCCGUUAUCAACUUGAAAAAGUGGCACCGAGUCGGU
GCmU*mU*mU*U
dgRNA CR001125 #1:
crRNA:

(SEQ ID NO: 373)

UUUUAUCACAGGCUCCAGGAGUUUUAGAGCUAUGCUGUUUUG
tracr:

(SEQ ID NO: 6660)

AACAGCAUAGCAAGUUAAAAUAAGGCUAGUCCGUUAUCAACUUGAAAAAG
UGGCACCGAGUCGGUGCUUUUUUU
dgRNA CR001125 #2:
crRNA:

(SEQ ID NO: 374)

mU*mU*mU*UAUCACAGGCUCCAGGAGUUUUAGAGCUAUGCUGUU*mU*m
U*mG
tracr:

(SEQ ID NO: 346)

mA*mA*mC*AGCAUAGCAAGUUAAAAUAAGGCUAGUCCGUUAUCAACUUG
AAAAAGUGGCACCGAGUCGGUGCUUUU*mU*mU*mU
dgRNA CR001125 #3:
crRNA:

(SEQ ID NO: 374)

mU*mU*mU*UAUCACAGGCUCCAGGAGUUUUAGAGCUAUGCUGUU*mU*m
U*mG
tracr:

(SEQ ID NO: 6660)

AACAGCAUAGCAAGUUAAAAUAAGGCUAGUCCGUUAUCAACUUGAAAAAG
UGGCACCGAGUCGGUGCUUUUUUU.

[0375] In aspects of the invention, a gRNA comprising the targeting domain of CR001030 (SEQ ID NO: 100, underlined below), e.g., one of the gRNA molecules described below, is useful in the CRISPR systems, methods, cells and other aspects and embodiments of the invention, including in aspects involving more than one gRNA molecule, e.g., described herein:

sgRNA CR001030 #1:

(SEQ ID NO: 375)

ACUGCUGAAAGAGAUGCGGUGUUUUAGAGCUAGAAAUAGCAAGUUAAAAU
AAGGCUAGUCCGUUAUCAACUUGAAAAAGUGGCACCGAGUCGGUGCUUUU
sgRNA CR001030 #2:

(SEQ ID NO: 376)

mA*mC*mU*GCUGAAAGAGAUGCGGUGUUUUAGAGCUAGAAAUAGCAAGU
UAAAAUAAGGCUAGUCCGUUAUCAACUUGAAAAAGUGGCACCGAGUCGGU
GCU*mU*mU*mU
sgRNA CR001030 #3:

(SEQ ID NO: 1770)

mA*mC*mU*GCUGAAAGAGAUGCGGUGUUUUAGAGCUAGAAAUAGCAAGU
UAAAAUAAGGCUAGUCCGUUAUCAACUUGAAAAAGUGGCACCGAGUCGGU
GCmU*mU*mU*U
dgRNA CR001030 #1:

(SEQ ID NO: 377)

crRNA: ACUGCUGAAAGAGAUGCGGUGUUUUAGAGCUAUGCUGUUUUG
tracr:

(SEQ ID NO: 6660)

AACAGCAUAGCAAGUUAAAAUAAGGCUAGUCCGUUAUCAACUUGAAAAAG
UGGCACCGAGUCGGUGCUUUUUUU
dgRNA CR001030 #2:
crRNA:

(SEQ ID NO: 378)

mA*mC*mU*GCUGAAAGAGAUGCGGUGUUUUAGAGCUAUGCUGUU*mU*m
U*mG
tracr:

(SEQ ID NO: 346)

mA*mA*mC*AGCAUAGCAAGUUAAAAUAAGGCUAGUCCGUUAUCAACUUG
AAAAAGUGGCACCGAGUCGGUGCUUUU*mU*mU*mU
dgRNA CR001030 #3:
crRNA:

(SEQ ID NO: 378)

mA*mC*mU*GCUGAAAGAGAUGCGGUGUUUUAGAGCUAUGCUGUU*mU*m
U*mG
tracr:

(SEQ ID NO: 6660)

AACAGCAUAGCAAGUUAAAAUAAGGCUAGUCCGUUAUCAACUUGAAAAAG
UGGCACCGAGUCGGUGCUUUUUUU.

[0376] In aspects of the invention, a gRNA comprising the targeting domain of CR001028 (SEQ ID NO: 98, underlined below), e.g., one of the gRNA molecules described below, is useful in the CRISPR systems, methods, cells and other aspects and embodiments of the invention, including in aspects involving more than one gRNA molecule, e.g., described herein:

sgRNA CR001028 #1:

(SEQ ID NO: 379)

UGCGGUGGGGAGAUAUGUAGGUUUUAGAGCUAGAAAUAGCAAGUUAAAAU
AAGGCUAGUCCGUUAUCAACUUGAAAAAGUGGCACCGAGUCGGUGCUUUU
sgRNA CR001028 #2:

(SEQ ID NO: 380)

mU*mG*mC*GGUGGGGAGAUAUGUAGGUUUUAGAGCUAGAAAUAGCAAGU
UAAAAUAAGGCUAGUCCGUUAUCAACUUGAAAAAGUGGCACCGAGUCGGU
GCU*mU*mU*mU
sgRNA CR001028 #3:

(SEQ ID NO: 1771)

mU*mG*mC*GGUGGGGAGAUAUGUAGGUUUUAGAGCUAGAAAUAGCAAGU
UAAAAUAAGGCUAGUCCGUUAUCAACUUGAAAAAGUGGCACCGAGUCGGU
GCmU*mU*mU*U
dgRNA CR001028 #1:

(SEQ ID NO: 381)

crRNA: UGCGGUGGGGAGAUAUGUAGGUUUUAGAGCUAUGCUGUUUUG
tracr:

(SEQ ID NO: 6660)

AACAGCAUAGCAAGUUAAAAUAAGGCUAGUCCGUUAUCAACUUGAAAAAG
UGGCACCGAGUCGGUGCUUUUUUU
dgRNA CR001028 #2:
crRNA:

(SEQ ID NO: 382)

mU*mG*mC*GGUGGGGAGAUAUGUAGGUUUUAGAGCUAUGCUGUU*mU*m
U*mG
tracr:

(SEQ ID NO: 346)

mA*mA*mC*AGCAUAGCAAGUUAAAAUAAGGCUAGUCCGUUAUCAACUUG
AAAAAGUGGCACCGAGUCGGUGCUUUU*mU*mU*mU
dgRNA CR001028 #3:
crRNA:

(SEQ ID NO: 382)

mU*mG*mC*GGUGGGGAGAUAUGUAGGUUUUAGAGCUAUGCUGUU*mU*m
U*mG
tracr:

(SEQ ID NO: 6660)

AACAGCAUAGCAAGUUAAAAUAAGGCUAGUCCGUUAUCAACUUGAAAAAG
UGGCACCGAGUCGGUGCUUUUUUU.

[0377] In aspects of the invention, a gRNA comprising the targeting domain of CR001221 (SEQ ID NO: 1589, underlined below), e.g., one of the gRNA molecules described below, is useful in the CRISPR systems, methods, cells and other aspects and embodiments of the invention, including in aspects involving more than one gRNA molecule, e.g., described herein:

sgRNA CR001221 #1:

(SEQ ID NO: 383)

GAAACAAUGAGGACCUGACUGUUUUAGAGCUAGAAAUAGCAAGUUAAAAU
AAGGCUAGUCCGUUAUCAACUUGAAAAAGUGGCACCGAGUCGGUGCUUUU
sgRNA CR001221 #2:

(SEQ ID NO: 384)

mG*mA*mA*ACAAUGAGGACCUGACUGUUUUAGAGCUAGAAAUAGCAAGU
UAAAAUAAGGCUAGUCCGUUAUCAACUUGAAAAAGUGGCACCGAGUCGGU
GCU*mU*mU*mU
sgRNA CR001221 #3:

(SEQ ID NO: 1772)

mG*mA*mA*ACAAUGAGGACCUGACUGUUUUAGAGCUAGAAAUAGCAAGU
UAAAAUAAGGCUAGUCCGUUAUCAACUUGAAAAAGUGGCACCGAGUCGGU
GCmU*mU*mU*U
dgRNA CR001221 #1:

(SEQ ID NO: 385)

crRNA: GAAACAAUGAGGACCUGACUGUUUUAGAGCUAUGCUGUUUUG
tracr:

(SEQ ID NO: 6660)

AACAGCAUAGCAAGUUAAAAUAAGGCUAGUCCGUUAUCAACUUGAAAAAG
UGGCACCGAGUCGGUGCUUUUUUU
dgRNA CR001221 #2:
crRNA:

(SEQ ID NO: 386)

mG*mA*mA*ACAAUGAGGACCUGACUGUUUUAGAGCUAUGCUGUU*mU*m
U*mG
tracr:

(SEQ ID NO: 346)

mA*mA*mC*AGCAUAGCAAGUUAAAAUAAGGCUAGUCCGUUAUCAACUUG
AAAAAGUGGCACCGAGUCGGUGCUUUU*mU*mU*mU
dgRNA CR001221 #3:
crRNA:

(SEQ ID NO: 386)

mG*mA*mA*ACAAUGAGGACCUGACUGUUUUAGAGCUAUGCUGUU*mU*m
U*mG
tracr:

(SEQ ID NO: 6660)

AACAGCAUAGCAAGUUAAAAUAAGGCUAGUCCGUUAUCAACUUGAAAAAG
UGGCACCGAGUCGGUGCUUUUUUU.

[0378] In aspects of the invention, a gRNA comprising the targeting domain of CR001137 (SEQ ID NO: 1505, underlined below), e.g., one of the gRNA molecules described below, is useful in the CRISPR systems, methods, cells and other aspects and embodiments of the invention, including in aspects involving more than one gRNA molecule, e.g., described herein:

sgRNA CR001137 #1:

(SEQ ID NO: 387)

GUAAGCAUUUAAGUGGCUACGUUUUAGAGCUAGAAAUAGCAAGUUAAAAU
AAGGCUAGUCCGUUAUCAACUUGAAAAAGUGGCACCGAGUCGGUGCUUUU
sgRNA CR001137 #2:

(SEQ ID NO: 388)

mG*mU*mA*AGCAUUUAAGUGGCUACGUUUUAGAGCUAGAAAUAGCAAGU
UAAAAUAAGGCUAGUCCGUUAUCAACUUGAAAAAGUGGCACCGAGUCGGU
GCU*mU*mU*mU
sgRNA CR001137 #3:

(SEQ ID NO: 1773)

mG*mU*mA*AGCAUUUAAGUGGCUACGUUUUAGAGCUAGAAAUAGCAAGU
UAAAAUAAGGCUAGUCCGUUAUCAACUUGAAAAAGUGGCACCGAGUCGGU
GCmU*mU*mU*U
dgRNA CR001137 #1:

(SEQ ID NO: 389)

crRNA: GUAAGCAUUUAAGUGGCUACGUUUUAGAGCUAUGCUGUUUUG
tracr:

(SEQ ID NO: 6660)

AACAGCAUAGCAAGUUAAAAUAAGGCUAGUCCGUUAUCAACUUGAAAAAG
UGGCACCGAGUCGGUGCUUUUUUU
dgRNA CR001137 #2:
crRNA:

(SEQ ID NO: 390)

mG*mU*mA*AGCAUUUAAGUGGCUACGUUUUAGAGCUAUGCUGUU*mU*m
U*mG
tracr:

(SEQ ID NO: 346)

mA*mA*mC*AGCAUAGCAAGUUAAAAUAAGGCUAGUCCGUUAUCAACUUG
AAAAAGUG
GCACCGAGUCGGUGCUUUU*mU*mU*mU
dgRNA CR001137 #3:
crRNA:

(SEQ ID NO: 390)

mG*mU*mA*AGCAUUUAAGUGGCUACGUUUUAGAGCUAUGCUGUU*mU*m
U*mG
tracr:

(SEQ ID NO: 6660)

AACAGCAUAGCAAGUUAAAAUAAGGCUAGUCCGUUAUCAACUUGAAAAAG
UGGCACCGAGUCGGUGCUUUUUUU.

[0379] In aspects of the invention, a gRNA comprising the targeting domain of CR003035 (SEQ ID NO: 1505, underlined below), e.g., one of the gRNA molecules described below, is useful in the CRISPR systems, methods, cells and other aspects and embodiments of the invention, including in aspects involving more than one gRNA molecule, e.g., described herein:

sgRNA CR003035 #1:

(SEQ ID NO: 391)

AGGCACCUCAGACUCAGCAUGUUUUAGAGCUAGAAAUAGCAAGUUAAAAU
AAGGCUAGUCCGUUAUCAACUUGAAAAAGUGGCACCGAGUCGGUGCUUUU
sgRNA CR003035 #2:

(SEQ ID NO: 392)

mA*mG*mG*CACCUCAGACUCAGCAGUUUUAGAGCUAGAAAUAGCAAGU
UAAAAUAAGGCUAGUCCGUUAUCAACUUGAAAAAGUGGCACCGAGUCGGU
GCU*mU*mU*mU
sgRNA CR003035 #3:

(SEQ ID NO: 1774)

mA*mG*mG*CACCUCAGACUCAGCAUGUUUUAGAGCUAGAAAUAGCAAGU
UAAAAUAAGGCUAGUCCGUUAUCAACUUGAAAAAGUGGCACCGAGUCGGU
GCmU*mU*mU*U
dgRNA CR003035 #1:

(SEQ ID NO: 393)

crRNA: AGGCACCUCAGACUCAGCAUGUUUUAGAGCUAUGCUGUUUUG
tracr:

(SEQ ID NO: 6660)

AACAGCAUAGCAAGUUAAAAUAAGGCUAGUCCGUUAUCAACUUGAAAAAG
UGGCACCGAGUCGGUGCUUUUUUU
dgRNA CR003035 #2:

(SEQ ID NO: 394)

crRNA: mA*mG*mG*CACCUCAGACUCAGCAUGUUUUAGAGCUAUGCUG
UU*mU*mU*mG
tracr:

(SEQ ID NO: 346)

mA*mA*mC*AGCAUAGCAAGUUAAAAUAAGGCUAGUCCGUUAUCAACUUG
AAAAAGUGGCACCGAGUCGGUGCUUUU*mU*mU*mU
dgRNA CR003035 #3:

(SEQ ID NO: 394)

crRNA: mA*mG*mG*CACCUCAGACUCAGCAUGUUUUAGAGCUAUGCUG
UU*mU*mU*mG
tracr:

(SEQ ID NO: 6660)

AACAGCAUAGCAAGUUAAAAUAAGGCUAGUCCGUUAUCAACUUGAAAAAG
UGGCACCGAGUCGGUGCUUUUUUU.

[0380] In aspects of the invention, a gRNA comprising the targeting domain of CR003085 (SEQ ID NO: 1750, underlined below), e.g., one of the gRNA molecules described below, is useful in the CRISPR systems, methods, cells and other aspects and embodiments of the invention, including in aspects involving more than one gRNA molecule, e.g., described herein:

sgRNA CR003085 #1:

(SEQ ID NO: 395)

AUGGUAUGGGAGGUAUACUAGUUUUAGAGCUAGAAAUAGCAAGUUAAAAU
AAGGCUAGUCCGUUAUCAACUUGAAAAAGUGGCACCGAGUCGGUGCUUUU
sgRNA CR003085 #2:

(SEQ ID NO: 396)

mA*mU*mG*GUAUGGGAGGUAUACUAGUUUUAGAGCUAGAAAUAGCAAGU
UAAAAUAAGGCUAGUCCGUUAUCAACUUGAAAAAGUGGCACCGAGUCGGU
GCU*mU*mU*mU
sgRNA CR003085 #3:

(SEQ ID NO: 1775)

mA*mU*mG*GUAUGGGAGGUAUACUAGUUUUAGAGCUAGAAAUAGCAAGU
UAAAAUAAGGCUAGUCCGUUAUCAACUUGAAAAAGUGGCACCGAGUCGGU
GCmU*mU*mU*U
dgRNA CR003085 #1:

(SEQ ID NO: 397)

crRNA: AUGGUAUGGGAGGUAUACUAGUUUUAGAGCUAUGCUGUUUUG
tracr:

(SEQ ID NO: 6660)

AACAGCAUAGCAAGUUAAAAUAAGGCUAGUCCGUUAUCAACUUGAAAAAG
UGGCACCGAGUCGGUGCUUUUUUU
dgRNA CR003085 #2:
crRNA:

(SEQ ID NO: 398)

mA*mU*mG*GUAUGGGAGGUAUACUAGUUUUAGAGCUAUGCUGUU*mU*m
U*mG
tracr:

(SEQ ID NO: 346)

mA*mA*mC*AGCAUAGCAAGUUAAAAUAAGGCUAGUCCGUUAUCAACUUG
AAAAAGUGGCACCGAGUCGGUGCUUUU*mU*mU*mU
dgRNA CR003085 #3:
crRNA:

(SEQ ID NO: 398)

mA*mU*mG*GUAUGGGAGGUAUACUAGUUUUAGAGCUAUGCUGUU*mU*m
U*mG
tracr:

(SEQ ID NO: 6660)

AACAGCAUAGCAAGUUAAAAUAAGGCUAGUCCGUUAUCAACUUGAAAAAG
UGGCACCGAGUCGGUGCUUUUUUU.

[0381] In each of the gRNA molecules described above, a “*” denotes a phosphorothioate bond between the adjacent nucleotides, and “mN” (where N=A, G, C or U) denotes a 2′-OMe modified nucleotide. In embodiments, any of the gRNA molecules described herein, e.g., described above, is complexed with a Cas9 molecule, e.g., as described herein, to form a ribonuclear protein complex (RNP). Such RNPs are particularly useful in the methods, cells, and other aspects and embodiments of the invention, e.g., described herein.

### IV. Cas Molecules

### Cas9 Molecules

[0382] In preferred embodiments, the Cas molecule is a Cas9 molecule. Cas9 molecules of a variety of species can be used in the methods and compositions described herein. While the S. pyogenes Cas9 molecule are the subject of much of the disclosure herein, Cas9 molecules of, derived from, or based on the Cas9 proteins of other species listed herein can be used as well. In other words, other Cas9 molecules, e.g., S. thermophilus, Staphylococcus aureus and/or Neisseria meningitidis Cas9 molecules, may be used in the systems, methods and compositions described herein. Additional Cas9 species include: Acidovorax avenae, Actinobacillus pleuropneumoniae, Actinobacillus succinogenes, Actinobacillus suis, Actinomyces sp., cycliphilus denitrificans, Aminomonas paucivorans, Bacillus cereus, Bacillus smithii, Bacillus thuringiensis, Bacteroides sp., Blastopirellula marina, Bradyrhiz obium sp., Brevibacillus latemsporus, Campylobacter coli, Campylobacter jejuni, Campylobacter lad, Candidatus Puniceispirillum, Clostridiu cellulolyticum, Clostridium perfringens, Corynebacterium accolens, Corynebacterium diphtheria, Corynebacterium matruchotii, Dinoroseobacter sliibae, Eubacterium dolichum, gamma proteobacterium, Gluconacetobacler diazotrophicus, Haemophilus parainfluenzae, Haemophilus sputorum, Helicobacter canadensis, Helicobacter cinaedi, Helicobacter mustelae, Ilyobacler polytropus, Kingella kingae, Lactobacillus crispatus, Listeria ivanovii, Listeria monocytogenes, Listeriaceae bacterium, Methylocystis sp., Methylosinus trichosporium, Mobiluncus mulieris, Neisseria bacilliformis, Neisseria cinerea, Neisseria flavescens, Neisseria lactamica. Neisseria sp., Neisseria wadsworthii, Nitrosomonas sp., Parvibaculum lavamentivorans, Pasteurella multocida, Phascolarctobacterium succinatutens, Ralstonia syzygii, Rhodopseudomonas palustris, Rhodovulum sp., Simonsiella muelleri, Sphingomonas sp., Sporolactobacillus vineae, Staphylococcus lugdunensis, Streptococcus sp., Subdoligranulum sp., Tislrella mobilis, Treponema sp., or Verminephrobacter eiseniae.

[0383] A Cas9 molecule, as that term is used herein, refers to a molecule that can interact with a gRNA molecule (e.g., sequence of a domain of a tracr) and, in concert with the gRNA molecule, localize (e.g., target or home) to a site which comprises a target sequence and PAM sequence.

[0384] In an embodiment, the Cas9 molecule is capable of cleaving a target nucleic acid molecule, which may be referred to herein as an active Cas9 molecule. In an embodiment, an active Cas9 molecule, comprises one or more of the following activities: a nickase activity, i.e., the ability to cleave a single strand, e.g., the non-complementary strand or the complementary strand, of a nucleic acid molecule; a double stranded nuclease activity, i.e., the ability to cleave both strands of a double stranded nucleic acid and create a double stranded break, which in an embodiment is the presence of two nickase activities; an endonuclease activity; an exonuclease activity; and a helicase activity, i.e., the ability to unwind the helical structure of a double stranded nucleic acid.

[0385] In an embodiment, an enzymatically active Cas9 molecule cleaves both DNA strands and results in a double stranded break. In an embodiment, a Cas9 molecule cleaves only one strand, e.g., the strand to which the gRNA hybridizes to, or the strand complementary to the strand the gRNA hybridizes with. In an embodiment, an active Cas9 molecule comprises cleavage activity associated with an HNH-like domain. In an embodiment, an active Cas9 molecule comprises cleavage activity associated with an N-terminal RuvC-like domain. In an embodiment, an active Cas9 molecule comprises cleavage activity associated with an HNH-like domain and cleavage activity associated with an N-terminal RuvC-like domain. In an embodiment, an active Cas9 molecule comprises an active, or cleavage competent, HNH-like domain and an inactive, or cleavage incompetent, N-terminal RuvC-like domain. In an embodiment, an active Cas9 molecule comprises an inactive, or cleavage incompetent, HNH-like domain and an active, or cleavage competent, N-terminal RuvC-like domain.

[0386] In an embodiment, the ability of an active Cas9 molecule to interact with and cleave a target nucleic acid is PAM sequence dependent. A PAM sequence is a sequence in the target nucleic acid. In an embodiment, cleavage of the target nucleic acid occurs upstream from the PAM sequence. Active Cas9 molecules from different bacterial species can recognize different sequence motifs (e.g., PAM sequences). In an embodiment, an active Cas9 molecule of S. pyogenes recognizes the sequence motif NGG and directs cleavage of a target nucleic acid sequence 1 to 10, e.g., 3 to 5, base pairs upstream from that sequence. See, e.g., Mali el ai, SCIENCE 2013; 339(6121): 823-826. In an embodiment, an active Cas9 molecule of S. thermophilus recognizes the sequence motif NGGNG and NNAG AAW (W=A or T) and directs cleavage of a core target nucleic acid sequence 1 to 10, e.g., 3 to 5, base pairs upstream from these sequences. See, e.g., Horvath et al., SCIENCE 2010; 327(5962): 167-170, and Deveau et al, J BACTERIOL 2008; 190(4): 1390-1400. In an embodiment, an active Cas9 molecule of S mulans recognizes the sequence motif NGG or NAAR (R-A or G) and directs cleavage of a core target nucleic acid sequence 1 to 10, e.g., 3 to 5 base pairs, upstream from this sequence. See, e.g., Deveau et al., J BACTERIOL 2008; 190(4): 1390-1400.

[0387] In an embodiment, an active Cas9 molecule of S. aureus recognizes the sequence motif NNGRR (R=A or G) and directs cleavage of a target nucleic acid sequence 1 to 10, e.g., 3 to 5, base pairs upstream from that sequence. See, e.g., Ran F. et al., NATURE, vol. 520, 2015, pp. 186-191. In an embodiment, an active Cas9 molecule of N. meningitidis recognizes the sequence motif NNNNGATT and directs cleavage of a target nucleic acid sequence 1 to 10, e.g., 3 to 5, base pairs upstream from that sequence. See, e.g., Hou et al., PNAS EARLY EDITION 2013, 1-6. The ability of a Cas9 molecule to recognize a PAM sequence can be determined, e.g., using a transformation assay described in Jinek et al, SCIENCE 2012, 337:816.

[0388] Some Cas9 molecules have the ability to interact with a gRNA molecule, and in conjunction with the gRNA molecule home (e.g., targeted or localized) to a core target domain, but are incapable of cleaving the target nucleic acid, or incapable of cleaving at efficient rates. Cas9 molecules having no, or no substantial, cleavage activity may be referred to herein as an inactive Cas9 (an enzymatically inactive Cas9), a dead Cas9, or a dCas9 molecule. For example, an inactive Cas9 molecule can lack cleavage activity or have substantially less, e.g., less than 20, 10, 5, 1 or 0.1% of the cleavage activity of a reference Cas9 molecule, as measured by an assay described herein.

[0389] Exemplary naturally occurring Cas9 molecules are described in Chylinski et al, RNA Biology 2013; 10:5, 727-737. Such Cas9 molecules include Cas9 molecules of a cluster 1 bacterial family, cluster 2 bacterial family, cluster 3 bacterial family, cluster 4 bacterial family, cluster 5 bacterial family, cluster 6 bacterial family, a cluster 7 bacterial family, a cluster 8 bacterial family, a cluster 9 bacterial family, a cluster 10 bacterial family, a cluster 11 bacterial family, a cluster 12 bacterial family, a cluster 13 bacterial family, a cluster 14 bacterial family, a cluster 1 bacterial family, a cluster 16 bacterial family, a cluster 17 bacterial family, a cluster 18 bacterial family, a cluster 19 bacterial family, a cluster 20 bacterial family, a cluster 21 bacterial family, a cluster 22 bacterial family, a cluster 23 bacterial family, a cluster 24 bacterial family, a cluster 25 bacterial family, a cluster 26 bacterial family, a cluster 27 bacterial family, a cluster 28 bacterial family, a cluster 29 bacterial family, a cluster 30 bacterial family, a cluster 31 bacterial family, a cluster 32 bacterial family, a cluster 33 bacterial family, a cluster 34 bacterial family, a cluster 35 bacterial family, a cluster 36 bacterial family, a cluster 37 bacterial family, a cluster 38 bacterial family, a cluster 39 bacterial family, a cluster 40 bacterial family, a cluster 41 bacterial family, a cluster 42 bacterial family, a cluster 43 bacterial family, a cluster 44 bacterial family, a cluster 45 bacterial family, a cluster 46 bacterial family, a cluster 47 bacterial family, a cluster 48 bacterial family, a cluster 49 bacterial family, a cluster 50 bacterial family, a cluster 51 bacterial family, a cluster 52 bacterial family, a cluster 53 bacterial family, a cluster 54 bacterial family, a cluster 55 bacterial family, a cluster 56 bacterial family, a cluster 57 bacterial family, a cluster 58 bacterial family, a cluster 59 bacterial family, a cluster 60 bacterial family, a cluster 61 bacterial family, a cluster 62 bacterial family, a cluster 63 bacterial family, a cluster 64 bacterial family, a cluster 65 bacterial family, a cluster 66 bacterial family, a cluster 67 bacterial family, a cluster 68 bacterial family, a cluster 69 bacterial family, a cluster 70 bacterial family, a cluster 71 bacterial family, a cluster 72 bacterial family, a cluster 73 bacterial family, a cluster 74 bacterial family, a cluster 75 bacterial family, a cluster 76 bacterial family, a cluster 77 bacterial family, or a cluster 78 bacterial family.

[0390] Exemplary naturally occurring Cas9 molecules include a Cas9 molecule of a cluster 1 bacterial family. Examples include a Cas9 molecule of: S. pyogenes (e.g., strain SF370, MGAS 10270, MGAS 10750, MGAS2096, MGAS315, MGAS5005, MGAS6180, MGAS9429, NZ131 and SSI-1), S. thermophilus (e.g., strain LMD-9), S. pseudoporcinus (e.g., strain SPIN 20026), S. mutans (e.g., strain UA 159, NN2025), S. macacae (e.g., strain NCTC1 1558), S. gallolylicus (e.g., strain UCN34, ATCC BAA-2069), S. equines (e.g., strain ATCC 9812, MGCS 124), S. dysdalactiae (e.g., strain GGS 124), S. bovis (e.g., strain ATCC 700338), S. cmginosus (e.g.; strain F0211), S. agalactia* (e.g., strain NEM316, A909), Listeria monocytogenes (e.g., strain F6854), Listeria innocua (L. innocua, e.g., strain Clip 1 1262), EtUerococcus italicus (e.g., strain DSM 15952), or Enterococcus faecium (e.g., strain 1,231,408). Additional exemplary Cas9 molecules are a Cas9 molecule of Neisseria meningitidis (Hou et al. PNAS Early Edition 2013, 1-6) and a S. aureus Cas9 molecule.

[0391] In an embodiment, a Cas9 molecule, e.g., an active Cas9 molecule or inactive Cas9 molecule, comprises an amino acid sequence: having 60%, 65%, 70%, 75%, 80%, 85%, 90%, 95%, 96%, 97%, 98%, or 99% homology with; differs at no more than 1%, 2%, 5%, 10%, 15%, 20%, 30%, or 40% of the amino acid residues when compared with; differs by at least 1, 2, 5, 10 or 20 amino acids but by no more than 100, 80, 70, 60, 50, 40 or 30 amino acids from; or is identical to; any Cas9 molecule sequence described herein or a naturally occurring Cas9 molecule sequence, e.g., a Cas9 molecule from a species listed herein or described in Chylinski et al., RNA Biology 2013, 10:5, ′I2′I-T,1 Hou et al. PNAS Early Edition 2013, 1-6.

[0392] In an embodiment, a Cas9 molecule comprises an amino acid sequence having 60%, 65%, 70%, 75%, 80%, 85%, 90%, 95%, 96%, 97%, 98%, or 99% homology with; differs at no more than 1%, 2%, 5%, 10%, 15%, 20%, 30%, or 40% of the amino acid residues when compared with; differs by at least 1, 2, 5, 10 or 20 amino acids but by no more than 100, 80, 70, 60, 50, 40 or 30 amino acids from; or is identical to; S. pyogenes Cas9:

```
(SEQ ID NO: 6611)
[sequence omitted]
                                1365
```

[0393] In embodiments, the Cas9 molecule is a S. pyogenes Cas9 variant of SEQ ID NO: 6611 that includes one or more mutations to positively charged amino acids (e.g., lysine, arginine or histidine) that introduce an uncharged or nonpolar amino acid, e.g., alanine, at said position. In embodiments, the mutation is to one or more positively charged amino acids in the nt-groove of Cas9. In embodiments, the Cas9 molecule is a S. pyogenes Cas9 variant of SEQ ID NO: 6611 that includes a mutation at position 855 of SEQ ID NO: 6611, for example a mutation to an uncharged amino acid, e.g., alanine, at position 855 of SEQ ID NO: 6611. In embodiments, the Cas9 molecule has a mutation only at position 855 of SEQ ID NO: 6611, relative to SEQ ID NO: 6611, e.g., to an uncharged amino acid, e.g., alanine. In embodiments, the Cas9 molecule is a S. pyogenes Cas9 variant of SEQ ID NO: 6611 that includes a mutation at position 810, a mutation at position 1003, and/or a mutation at position 1060 of SEQ ID NO: 6611, for example a mutation to alanine at position 810, position 1003, and/or position 1060 of SEQ ID NO: 6611. In embodiments, the Cas9 molecule has a mutation only at position 810, position 1003, and position 1060 of SEQ ID NO: 6611, relative to SEQ ID NO: 6611, e.g., where each mutation is to an uncharged amino acid, for example, alanine. In embodiments, the Cas9 molecule is a S. pyogenes Cas9 variant of SEQ ID NO: 6611 that includes a mutation at position 848, a mutation at position 1003, and/or a mutation at position 1060 of SEQ ID NO: 6611, for example a mutation to alanine at position 848, position 1003, and/or position 1060 of SEQ ID NO: 6611. In embodiments, the Cas9 molecule has a mutation only at position 848, position 1003, and position 1060 of SEQ ID NO: 6611, relative to SEQ ID NO: 6611, e.g., where each mutation is to an uncharged amino acid, for example, alanine. In embodiments, the Cas9 molecule is a Cas9 molecule as described in Slaymaker et al., Science Express, available online Dec. 1, 2015 at Science DOI: 10.1126/science.aad5227.

[0394] In embodiments, the Cas9 molecule is a S. pyogenes Cas9 variant of SEQ ID NO: 6611 that includes one or more mutations. In embodiments, the Cas9 variant comprises a mutation at position 80 of SEQ ID NO: 6611, e.g., includes a leucine at position 80 of SEQ ID NO: 6611 (i.e., comprises, e.g., consists of, SEQ ID NO: 6611 with a C80L mutation). In embodiments, the Cas9 variant comprises a mutation at position 574 of SEQ ID NO: 6611, e.g., includes a glutamic acid at position 574 of SEQ ID NO: 6611 (i.e., comprises, e.g., consists of, SEQ ID NO: 6611 with a C574E mutation). In embodiments, the Cas9 variant comprises a mutation at position 80 and a mutation at position 574 of SEQ ID NO: 6611, e.g., includes a leucine at position 80 of SEQ ID NO: 6611, and a glutamic acid at position 574 of SEQ ID NO: 6611 (i.e., comprises, e.g., consists of, SEQ ID NO: 6611 with a C80L mutation and a C574E mutation). Without being bound by theory, it is believed that such mutations improve the solution properties of the Cas9 molecule.

[0395] In embodiments, the Cas9 molecule is a S. pyogenes Cas9 variant of SEQ ID NO: 6611 that includes one or more mutations. In embodiments, the Cas9 variant comprises a mutation at position 147 of SEQ ID NO: 6611, e.g., includes a tyrosine at position 147 of SEQ ID NO: 6611 (i.e., comprises, e.g., consists of, SEQ ID NO: 6611 with a D147Y mutation). In embodiments, the Cas9 variant comprises a mutation at position 411 of SEQ ID NO: 6611, e.g., includes a threonine at position 411 of SEQ ID NO: 6611 (i.e., comprises, e.g., consists of, SEQ ID NO: 6611 with a P411T mutation). In embodiments, the Cas9 variant comprises a mutation at position 147 and a mutation at position 411 of SEQ ID NO: 6611, e.g., includes a tyrosine at position 147 of SEQ ID NO: 6611, and a threonine at position 411 of SEQ ID NO: 6611 (i.e., comprises, e.g., consists of, SEQ ID NO: 6611 with a D147Y mutation and a P411T mutation). Without being bound by theory, it is believed that such mutations improve the targeting efficiency of the Cas9 molecule, e.g., in yeast.

[0396] In embodiments, the Cas9 molecule is a S. pyogenes Cas9 variant of SEQ ID NO: 6611 that includes one or more mutations. In embodiments, the Cas9 variant comprises a mutation at position 1135 of SEQ ID NO: 6611, e.g., includes a glutamic acid at position 1135 of SEQ ID NO: 6611 (i.e., comprises, e.g., consists of, SEQ ID NO: 6611 with a D1135E mutation). Without being bound by theory, it is believed that such mutations improve the selectivity of the Cas9 molecule for the NGG PAM sequence versus the NAG PAM sequence.

[0397] In embodiments, the Cas9 molecule is a S. pyogenes Cas9 variant of SEQ ID NO: 6611 that includes one or more mutations that introduce an uncharged or nonpolar amino acid, e.g., alanine, at certain positions. In embodiments, the Cas9 molecule is a S. pyogenes Cas9 variant of SEQ ID NO: 6611 that includes a mutation at position 497, a mutation at position 661, a mutation at position 695 and/or a mutation at position 926 of SEQ ID NO: 6611, for example a mutation to alanine at position 497, position 661, position 695 and/or position 926 of SEQ ID NO: 6611. In embodiments, the Cas9 molecule has a mutation only at position 497, position 661, position 695, and position 926 of SEQ ID NO: 6611, relative to SEQ ID NO: 6611, e.g., where each mutation is to an uncharged amino acid, for example, alanine Without being bound by theory, it is believed that such mutations reduce the cutting by the Cas9 molecule at off-target sites

[0398] It will be understood that the mutations described herein to the Cas9 molecule may be combined, and may be combined with any of the fusions or other modifications described herein, and the Cas9 molecule tested in the assays described herein.

[0399] Various types of Cas molecules can be used to practice the inventions disclosed herein. In some embodiments, Cas molecules of Type II Cas systems are used. In other embodiments, Cas molecules of other Cas systems are used. For example, Type I or Type III Cas molecules may be used. Exemplary Cas molecules (and Cas systems) are described, e.g., in Haft et ai, PLoS COMPUTATIONAL BIOLOGY 2005, 1(6): e60 and Makarova et al, NATURE REVIEW MICROBIOLOGY 2011, 9:467-477, the contents of both references are incorporated herein by reference in their entirety.

[0400] In an embodiment, the Cas9 molecule comprises one or more of the following activities: a nickase activity; a double stranded cleavage activity (e.g., an endonuclease and/or exonuclease activity); a helicase activity; or the ability, together with a gRNA molecule, to localize to a target nucleic acid.

### Altered Cas9 Molecules

[0401] Naturally occurring Cas9 molecules possess a number of properties, including: nickase activity, nuclease activity (e.g., endonuclease and/or exonuclease activity); helicase activity; the ability to associate functionally with a gRNA molecule; and the ability to target (or localize to) a site on a nucleic acid (e.g., PAM recognition and specificity). In an embodiment, a Cas9 molecules can include all or a subset of these properties. In typical embodiments, Cas9 molecules have the ability to interact with a gRNA molecule and, in concert with the gRNA molecule, localize to a site in a nucleic acid. Other activities, e.g., PAM specificity, cleavage activity, or helicase activity can vary more widely in Cas9 molecules.

[0402] Cas9 molecules with desired properties can be made in a number of ways, e.g., by alteration of a parental, e.g., naturally occurring Cas9 molecules to provide an altered Cas9 molecule having a desired property. For example, one or more mutations or differences relative to a parental Cas9 molecule can be introduced. Such mutations and differences comprise: substitutions (e.g., conservative substitutions or substitutions of non-essential amino acids); insertions; or deletions. In an embodiment, a Cas9 molecule can comprises one or more mutations or differences, e.g., at least 1, 2, 3, 4, 5, 10, 15, 20, 30, 40 or 50 mutations but less than 200, 100, or 80 mutations relative to a reference Cas9 molecule.

[0403] In an embodiment, a mutation or mutations do not have a substantial effect on a Cas9 activity, e.g. a Cas9 activity described herein. In an embodiment, a mutation or mutations have a substantial effect on a Cas9 activity, e.g. a Cas9 activity described herein. In an embodiment, exemplary activities comprise one or more of PAM specificity, cleavage activity, and helicase activity. A mutation(s) can be present, e.g., in: one or more RuvC-like domain, e.g., an N-terminal RuvC-like domain; an HNH-like domain; a region outside the RuvC-like domains and the HNH-like domain. In some embodiments, a mutation(s) is present in an N-terminal RuvC-like domain. In some embodiments, a mutation(s) is present in an HNH-like domain. In some embodiments, mutations are present in both an N-terminal RuvC-like domain and an HNH-like domain.

[0404] Whether or not a particular sequence, e.g., a substitution, may affect one or more activity, such as targeting activity, cleavage activity, etc, can be evaluated or predicted, e.g., by evaluating whether the mutation is conservative or by the method described in Section III. In an embodiment, a “non-essential” amino acid residue, as used in the context of a Cas9 molecule, is a residue that can be altered from the wild-type sequence of a Cas9 molecule, e.g., a naturally occurring Cas9 molecule, e.g., an active Cas9 molecule, without abolishing or more preferably, without substantially altering a Cas9 activity (e.g., cleavage activity), whereas changing an “essential” amino acid residue results in a substantial loss of activity (e.g., cleavage activity).

Cas9 Molecules with Altered PAM Recognition or No PAM Recognition

[0405] Naturally occurring Cas9 molecules can recognize specific PAM sequences, for example the PAM recognition sequences described above for S. pyogenes, S. thermophilus, S. mutans, S. aureus and N. meningitidis.

[0406] In an embodiment, a Cas9 molecule has the same PAM specificities as a naturally occurring Cas9 molecule. In other embodiments, a Cas9 molecule has a PAM specificity not associated with a naturally occurring Cas9 molecule, or a PAM specificity not associated with the naturally occurring Cas9 molecule to which it has the closest sequence homology. For example, a naturally occurring Cas9 molecule can be altered, e.g., to alter PAM recognition, e.g., to alter the PAM sequence that the Cas9 molecule recognizes to decrease off target sites and/or improve specificity; or eliminate a PAM recognition requirement. In an embodiment, a Cas9 molecule can be altered, e.g., to increase length of PAM recognition sequence and/or improve Cas9 specificity to high level of identity to decrease off target sites and increase specificity. In an embodiment, the length of the PAM recognition sequence is at least 4, 5, 6, 7, 8, 9, 10 or 15 amino acids in length. Cas9 molecules that recognize different PAM sequences and/or have reduced off-target activity can be generated using directed evolution. Exemplary methods and systems that can be used for directed evolution of Cas9 molecules are described, e.g., in Esvelt el al, Nature 2011, 472(7344): 499-503. Candidate Cas9 molecules can be evaluated, e.g., by methods described herein.

### Non-Cleaving and Modified-Cleavage Cas9 Molecules

[0407] In an embodiment, a Cas9 molecule comprises a cleavage property that differs from naturally occurring Cas9 molecules, e.g., that differs from the naturally occurring Cas9 molecule having the closest homology. For example, a Cas9 molecule can differ from naturally occurring Cas9 molecules, e.g., a Cas9 molecule of S. pyogenes, as follows: its ability to modulate, e.g., decreased or increased, cleavage of a double stranded break (endonuclease and/or exonuclease activity), e.g., as compared to a naturally occurring Cas9 molecule (e.g., a Cas9 molecule of S. pyogenes); its ability to modulate, e.g., decreased or increased, cleavage of a single strand of a nucleic acid, e.g., a non-complimentary strand of a nucleic acid molecule or a complementary strand of a nucleic acid molecule (nickase activity), e.g., as compared to a naturally occurring Cas9 molecule (e.g., a Cas9 molecule of S. pyogenes); or the ability to cleave a nucleic acid molecule, e.g., a double stranded or single stranded nucleic acid molecule, can be eliminated.

### Modified Cleavage Active Cas9 Molecules

[0408] In an embodiment, an active Cas9 molecule comprises one or more of the following activities: cleavage activity associated with an N-terminal RuvC-like domain; cleavage activity associated with an HNH-like domain; cleavage activity associated with an HNH domain and cleavage activity associated with an N-terminal RuvC-like domain.

[0409] In an embodiment, the Cas9 molecule is a Cas9 nickase, e.g., cleaves only a single strand of DNA. In an embodiment, the Cas9 nickase includes a mutation at position 10 and/or a mutation at position 840 of SEQ ID NO: 6611, e.g., comprises a D10A and/or H840A mutation to SEQ ID NO: 6611.

### Non-Cleaving Inactive Cas9 Molecules

[0410] In an embodiment, the altered Cas9 molecule is an inactive Cas9 molecule which does not cleave a nucleic acid molecule (either double stranded or single stranded nucleic acid molecules) or cleaves a nucleic acid molecule with significantly less efficiency, e.g., less than 20, 10, 5, 1 or 0.1% of the cleavage activity of a reference Cas9 molecule, e.g., as measured by an assay described herein. The reference Cas9 molecule can by a naturally occurring unmodified Cas9 molecule, e.g., a naturally occurring Cas9 molecule such as a Cas9 molecule of S. pyogenes, S. thermophilus, S. aureus or N. meningitidis. In an embodiment, the reference Cas9 molecule is the naturally occurring Cas9 molecule having the closest sequence identity or homology. In an embodiment, the inactive Cas9 molecule lacks substantial cleavage activity associated with an N-terminal RuvC-like domain and cleavage activity associated with an HNH-like domain.

[0411] In an embodiment, the Cas9 molecule is dCas9. Tsai et al. (2014), Nat. Biotech. 32:569-577.

[0412] A catalytically inactive Cas9 molecule may be fused with a transcription repressor. An inactive Cas9 fusion protein complexes with a gRNA and localizes to a DNA sequence specified by gRNA's targeting domain, but, unlike an active Cas9, it will not cleave the target DNA. Fusion of an effector domain, such as a transcriptional repression domain, to an inactive Cas9 enables recruitment of the effector to any DNA site specified by the gRNA. Site specific targeting of a Cas9 fusion protein to a promoter region of a gene can block or affect polymerase binding to the promoter region, for example, a Cas9 fusion with a transcription factor (e.g., a transcription activator) and/or a transcriptional enhancer binding to the nucleic acid to increase or inhibit transcription activation. Alternatively, site specific targeting of a a Cas9-fusion to a transcription repressor to a promoter region of a gene can be used to decrease transcription activation.

[0413] Transcription repressors or transcription repressor domains that may be fused to an inactive Cas9 molecule can include ruppel associated box (KRAB or SKD), the Mad mSIN3 interaction domain (SID) or the ERF repressor domain (ERD).

[0414] In another embodiment, an inactive Cas9 molecule may be fused with a protein that modifies chromatin. For example, an inactive Cas9 molecule may be fused to heterochromatin protein 1 (HP1), a histone lysine methyltransferase (e.g., SUV39H 1, SUV39H2, G9A, ESET/SETDB 1, Pr-SET7/8, SUV4-20H 1,RIZ1), a histone lysine demethylates (e.g., LSD1/BHC1 10, SpLsdl/Sw, 1/Safl 10, Su(var)3-3, JMJD2A/JHDM3A, JMJD2B, JMJD2C/GASC1, JMJD2D, Rph1, JARID 1 A/RBP2, JARI DIB/PLU-I, JAR1D 1C/SMCX, JARID1 D/SMCY, Lid, Jhn2, Jmj2), a histone lysine deacetylases (e.g., HDAC1, HDAC2, HDAC3, HDAC8, Rpd3, Hos 1, Cir6, HDAC4, HDAC5, HDAC7, HDAC9, Hda1, Cir3, SIRT 1, SIRT2, Sir2, Hst 1, Hst2, Hst3, Hst4, HDAC 11) and a DNA methylases (DNMT1,DNMT2a/DMNT3b, MET1). An inactive Cas9-chomatin modifying molecule fusion protein can be used to alter chromatin status to reduce expression a target gene.

[0415] The heterologous sequence (e.g., the transcription repressor domain) may be fused to the N- or C-terminus of the inactive Cas9 protein. In an alternative embodiment, the heterologous sequence (e.g., the transcription repressor domain) may be fused to an internal portion (i.e., a portion other than the N-terminus or C-terminus) of the inactive Cas9 protein.

[0416] The ability of a Cas9 molecule/gRNA molecule complex to bind to and cleave a target nucleic acid can be evaluated, e.g., by the methods described herein in Section III. The activity of a Cas9 molecule, e.g., either an active Cas9 or a inactive Cas9, alone or in a complex with a gRNA molecule may also be evaluated by methods well-known in the art, including, gene expression assays and chromatin-based assays, e.g., chromatin immunoprecipitation (ChiP) and chromatin in vivo assay (CiA).

### Other Cas9 Molecule Fusions

[0417] In embodiments, the Cas9 molecule, e.g, a Cas9 of S. pyogenes, may additionally comprise one or more amino acid sequences that confer additional activity.

[0418] In some aspects, the Cas9 molecule may comprise one or more nuclear localization sequences (NLSs), such as at least 1, 2, 3, 4, 5, 6, 7, 8, 9, 10, or more NLSs. In some embodiments, the Cas9 molecule comprises at least 1, 2, 3, 4, 5, 6, 7, 8, 9, 10, or more NLSs at or near the amino-terminus, at least 1, 2, 3, 4, 5, 6, 7, 8, 9, 10, or more NLSs at or near the carboxy-terminus, or a combination of these (e.g. one or more NLS at the amino-terminus and one or more NLS at the carboxy terminus). When more than one NLS is present, each may be selected independently of the others, such that a single NLS may be present in more than one copy and/or in combination with one or more other NLSs present in one or more copies. In some embodiments, an NLS is considered near the N- or C-terminus when the nearest amino acid of the NLS is within about 1, 2, 3, 4, 5, 10, 15, 20, 25, 30, 40, 50, or more amino acids along the polypeptide chain from the N- or C-terminus. Typically, an NLS consists of one or more short sequences of positively charged lysines or arginines exposed on the protein surface, but other types of NLS are known. Non-limiting examples of NLSs include an NLS sequence comprising or derived from: the NLS of the SV40 virus large T-antigen, having the amino acid sequence PKKKRKV (SEQ ID NO: 6612); the NLS from nucleoplasmin (e.g. the nucleoplasmin bipartite NLS with the sequence KRPAATKKAGQAKKKK (SEQ ID NO: 6613); the c-myc NLS having the amino acid sequence PAAKRVKLD (SEQ ID NO: 6614) or RQRRNELKRSP (SEQ ID NO: 6615); the hRNPA1 M9 NLS having the sequence NQSSNFGPMKGGNFGGRSSGPYGGGGQYFAKPRNQGGY (SEQ ID NO: 6616); the sequence RMRIZFKNKGKDTAELRRRRVEVSVELRKAKKDEQILKRRNV (SEQ ID NO: 6617) of the IBB domain from importin-alpha; the sequences VSRKRPRP (SEQ ID NO: 6618) and PPKKARED (SEQ ID NO: 6619) of the myoma T protein; the sequence PQPKKKPL (SEQ ID NO: 6620) of human p53; the sequence SALIKKKKKMAP (SEQ ID NO: 6621) of mouse c-ab1 IV; the sequences DRLRR (SEQ ID NO: 6622) and PKQKKRK (SEQ ID NO: 6623) of the influenza virus NS1; the sequence RKLKKKIKKL (SEQ ID NO: 6624) of the Hepatitis virus delta antigen; the sequence REKKKFLKRR (SEQ ID NO: 6625) of the mouse Mxl protein; the sequence KRKGDEVDGVDEVAKKKSKK (SEQ ID NO: 6626) of the human poly(ADP-ribose) polymerase; and the sequence RKCLQAGMNLEARKTKK (SEQ ID NO: 6627) of the steroid hormone receptors (human) glucocorticoid. Other suitable NLS sequences are known in the art (e.g., Sorokin, Biochemistry (Moscow) (2007) 72:13, 1439-1457; Lange J Biol Chem. (2007) 282:8, 5101-5).

[0419] In an embodiment, the Cas9 molecule, e.g., S. pyogenes Cas9 molecule, comprises a NLS sequence of SV40, e.g., disposed N terminal to the Cas9 molecule. In an embodiment, the Cas9 molecule, e.g., S. pyogenes Cas9 molecule, comprises a NLS sequence of SV40 disposed N-terminal to the Cas9 molecule and a NLS sequence of SV40 disposed C terminal to the Cas9 molecule. In an embodiment, the Cas9 molecule, e.g., S. pyogenes Cas9 molecule, comprises a NLS sequence of SV40 disposed N-terminal to the Cas9 molecule and a NLS sequence of nucleoplasmin disposed C-terminal to the Cas9 molecule. In any of the aforementioned embodiments, the molecule may additionally comprise a tag, e.g., a His tag, e.g., a His(6) tag or His(8) tag, e.g., at the N terminus or the C terminus.

[0420] In some aspects, the Cas9 molecule may comprise one or more amino acid sequences that allow the Cas9 molecule to be specifically recognized, for example a tag. In one embodiment, the tag is a Histidine tag, e.g., a histidine tag comprising at least 3, 4, 5, 6, 7, 8, 9, 10 or more histidine amino acids. In embodiments, the histidine tag is a His6 tag (six histidines). In other embodiments, the histidine tag is a His8 tag (eight histidines). In embodiments, the histidine tag may be separated from one or more other portions of the Cas9 molecule by a linker. In embodiments, the linker is GGS. An example of such a fusion is the Cas9 molecule iProt106520.

[0421] In some aspects, the Cas9 molecule may comprise one or more amino acid sequences that are recognized by a protease (e.g., comprise a protease cleavage site). In embodiments, the cleavage site is the tobacco etch virus (TEV) cleavage site, e.g., comprises the sequence ENLYFQG (SEQ ID NO: 7810). In some aspects the protease cleavage site, e.g., the TEV cleavage site is disposed between a tag, e.g., a His tag, e.g., a His6 or His8 tag, and the remainder of the Cas9 molecule. Without being bound by theory it is believed that such introduction will allow for the use of the tag for, e.g., purification of the Cas9 molecule, and then subsequent cleavage so the tag does not interfere with the Cas9 molecule function.

[0422] In embodiments, the Cas9 molecule (e.g., a Cas9 molecule as described herein) comprises an N-terminal NLS, and a C-terminal NLS (e.g., comprises, from N- to C-terminal NLS-Cas9-NLS), e.g., wherein each NLS is an SV40 NLS (PKKKRKV (SEQ ID NO: 6612)). In embodiments, the Cas9 molecule (e.g., a Cas9 molecule as described herein) comprises an N-terminal NLS, a C-terminal NLS, and a C-terminal His6 tag (e.g., comprises, from N- to C-terminal NLS-Cas9-NLS-His tag), e.g., wherein each NLS is an SV40 NLS (PKKKRKV (SEQ ID NO: 6612)). In embodiments, the Cas9 molecule (e.g., a Cas9 molecule as described herein) comprises an N-terminal His tag (e.g., His6 tag), an N-terminal NLS, and a C-terminal NLS (e.g., comprises, from N- to C-terminal His tag-NLS-Cas9-NLS), e.g., wherein each NLS is an SV40 NLS (PKKKRKV (SEQ ID NO: 6612)). In embodiments, the Cas9 molecule (e.g., a Cas9 molecule as described herein) comprises an N-terminal NLS and a C-terminal His tag (e.g., His6 tag) (e.g., comprises from N- to C-terminal His tag-Cas9-NLS), e.g., wherein the NLS is an SV40 NLS (PKKKRKV (SEQ ID NO: 6612)). In embodiments, the Cas9 molecule (e.g., a Cas9 molecule as described herein) comprises an N-terminal NLS and a C-terminal His tag (e.g., His6 tag) (e.g., comprises from N- to C-terminal NLS-Cas9-His tag), e.g., wherein the NLS is an SV40 NLS (PKKKRKV (SEQ ID NO: 6612)). In embodiments, the Cas9 molecule (e.g., a Cas9 molecule as described herein) comprises an N-terminal His tag (e.g., His8 tag), an N-terminal cleavage domain (e.g., a tobacco etch virus (TEV) cleavage domain (e.g., comprises the sequence ENLYFQG (SEQ ID NO: 7810))), an N-terminal NLS (e.g., an SV40 NLS; SEQ ID NO: 6612), and a C-terminal NLS (e.g., an SV40 NLS; SEQ ID NO: 6612) (e.g., comprises from N- to C-terminal His tag-TEV-NLS-Cas9-NLS). In any of the aforementioned embodiments the Cas9 has the sequence of SEQ ID NO: 6611. Alternatively, in any of the aforementioned embodiments, the Cas9 has a sequence of a Cas9 variant of SEQ ID NO: 6611, e.g., as described herein. In any of the aforementioned embodiments, the Cas9 molecule comprises a linker between the His tag and another portion of the molecule, e.g., a GGS linker. Amino acid sequences of exemplary Cas9 molecules described above are provided below. “iProt” identifiers match those in FIG. 60.

iProt105026 (also referred to as iProt106154, iProt106331,
iProt106545, and PID426303, depending on the preparation of the
protein) (SEQ ID NO: 7821):
MAPKKKRKVD KKYSIGLDIG TNSVGWAVIT DEYKVPSKKF KVLGNTDRHS IKKNLIGALL
FDSGETAEAT RLKRTARRRY TRRKNRICYL QEIFSNEMAK VDDSFFHRLE ESFLVEEDKK
HERHPIFGNI VDEVAYHEKY PTIYHLRKKL VDSTDKADLR LIYLALAHMI KFRGHFLIEG
DLNPDNSDVD KLFIQLVQTY NQLFEENPIN ASGVDAKAIL SARLSKSRRL ENLIAQLPGE
KKNGLFGNLI ALSLGLTPNF KSNFDLAEDA KLQLSKDTYD DDLDNLLAQI GDQYADLFLA
AKNLSDAILL SDILRVNTEI TKAPLSASMI KRYDEHHQDL TLLKALVRQQ LPEKYKEIFF
DQSKNGYAGY IDGGASQEEF YKFIKPILEK MDGTEELLVK LNREDLLRKQ RTFDNGSIPH
QIHLGELHAI LRRQEDFYPF LKDNREKIEK ILTFRIPYYV GPLARGNSRF AWMTRKSEET
ITPWNFEEVV DKGASAQSFI ERMTNFDKNL PNEKVLPKHS LLYEYFTVYN ELTKVKYVTE
GMRKPAFLSG EQKKAIVDLL FKTNRKVTVK QLKEDYFKKI ECFDSVEISG VEDRFNASLG
TYHDLLKIIK DKDFLDNEEN EDILEDIVLT LTLFEDREMI EERLKTYAHL FDDKVMKQLK
RRRYTGWGRL SRKLINGIRD KQSGKTILDF LKSDGFANRN FMQLIHDDSL TFKEDIQKAQ
VSGQGDSLHE HIANLAGSPA IKKGILQTVK VVDELVKVMG RHKPENIVIE MARENQTTQK
GQKNSRERMK RIEEGIKELG SQILKEHPVE NTQLQNEKLY LYYLQNGRDM YVDQELDINR
LSDYDVDHIV PQSFLKDDSI DNKVLTRSDK NRGKSDNVPS EEVVKKMKNY
WRQLLNAKLI TQRKFDNLTK AERGGLSELD KAGFIKRQLV ETRQITKHVA QILDSRMNTK
YDENDKLIRE VKVITLKSKL VSDFRKDFQF YKVREINNYH HAHDAYLNAV VGTALIKKYP
KLESEFVYGD YKVYDVRKMI AKSEQEIGKA TAKYFFYSNI MNFFKTEITL ANGEIRKRPL
IETNGETGEI VWDKGRDFAT VRKVLSMPQV NIVKKTEVQT GGFSKESILP KRNSDKLIAR
KKDWDPKKYG GFDSPTVAYS VLVVAKVEKG KSKKLKSVKE LLGITIMERS SFEKNPIDFL
EAKGYKEVKK DLIIKLPKYS LFELENGRKR MLASAGELQK GNELALPSKY VNFLYLASHY
EKLKGSPEDN EQKQLFVEQH KHYLDEIIEQ ISEFSKRVIL ADANLDKVLS AYNKHRDKPI
REQAENIIHL FTLTNLGAPA AFKYFDTTID RKRYTSTKEV LDATLIHQSI TGLYETRIDL
SQLGGDSRAD PKKKRKVHHH HHH
iProt106518 (SEQ ID NO: 7822):
MAPKKKRKVD KKYSIGLDIG TNSVGWAVIT DEYKVPSKKF KVLGNTDRHS IKKNLIGALL
FDSGETAEAT RLKRTARRRY TRRKNRILYL QEIFSNEMAK VDDSFFHRLE ESFLVEEDKK
HERHPIFGNI VDEVAYHEKY PTIYHLRKKL VDSTDKADLR LIYLALAHMI KFRGHFLIEG
DLNPDNSDVD KLFIQLVQTY NQLFEENPIN ASGVDAKAIL SARLSKSRRL ENLIAQLPGE
KKNGLFGNLI ALSLGLTPNF KSNFDLAEDA KLQLSKDTYD DDLDNLLAQI GDQYADLFLA
AKNLSDAILL SDILRVNTEI TKAPLSASMI KRYDEHHQDL TLLKALVRQQ LPEKYKEIFF
DQSKNGYAGY IDGGASQEEF YKFIKPILEK MDGTEELLVK LNREDLLRKQ RTFDNGSIPH
QIHLGELHAI LRRQEDFYPF LKDNREKIEK ILTFRIPYYV GPLARGNSRF AWMTRKSEET
ITPWNFEEVV DKGASAQSFI ERMTNFDKNL PNEKVLPKHS LLYEYFTVYN ELTKVKYVTE
GMRKPAFLSG EQKKAIVDLL FKTNRKVTVK QLKEDYFKKI EEFDSVEISG VEDRFNASLG
TYHDLLKIIK DKDFLDNEEN EDILEDIVLT LTLFEDREMI EERLKTYAHL FDDKVMKQLK
RRRYTGWGRL SRKLINGIRD KQSGKTILDF LKSDGFANRN FMQLIHDDSL TFKEDIQKAQ
VSGQGDSLHE HIANLAGSPA IKKGILQTVK VVDELVKVMG RHKPENIVIE MARENQTTQK
GQKNSRERMK RIEEGIKELG SQILKEHPVE NTQLQNEKLY LYYLQNGRDM YVDQELDINR
LSDYDVDHIV PQSFLKDDSI DNKVLTRSDK NRGKSDNVPS EEVVKKMKNY
WRQLLNAKLI TQRKFDNLTK AERGGLSELD KAGFIKRQLV ETRQITKHVA QILDSRMNTK
YDENDKLIRE VKVITLKSKL VSDFRKDFQF YKVREINNYH HAHDAYLNAV VGTALIKKYP
KLESEFVYGD YKVYDVRKMI AKSEQEIGKA TAKYFFYSNI MNFFKTEITL ANGEIRKRPL
IETNGETGEI VWDKGRDFAT VRKVLSMPQV NIVKKTEVQT GGFSKESILP KRNSDKLIAR
KKDWDPKKYG GFDSPTVAYS VLVVAKVEKG KSKKLKSVKE LLGITIMERS SFEKNPIDFL
EAKGYKEVKK DLIIKLPKYS LFELENGRKR MLASAGELQK GNELALPSKY VNFLYLASHY
EKLKGSPEDN EQKQLFVEQH KHYLDEIIEQ ISEFSKRVIL ADANLDKVLS AYNKHRDKPI
REQAENIIHL FTLTNLGAPA AFKYFDTTID RKRYTSTKEV LDATLIHQSI TGLYETRIDL
SQLGGDSRAD PKKKRKVHHH HHH
iProt106519 (SEQ ID NO: 7823):
MGSSHHHHHH HHENLYFQGS MDKKYSIGLD IGTNSVGWAV ITDEYKVPSK
KFKVLGNTDR HSIKKNLIGA LLFDSGETAE ATRLKRTARR RYTRRKNRIC YLQEIFSNEM
AKVDDSFFHR LEESFLVEED KKHERHPIFG NIVDEVAYHE KYPTIYHLRK KLVDSTDKAD
LRLIYLALAH MIKFRGHFLI EGDLNPDNSD VDKLFIQLVQ TYNQLFEENP INASGVDAKA
ILSARLSKSR RLENLIAQLP GEKKNGLFGN LIALSLGLTP NFKSNFDLAE DAKLQLSKDT
YDDDLDNLLA QIGDQYADLF LAAKNLSDAI LLSDILRVNT EITKAPLSAS MIKRYDEHHQ
DLTLLKALVR QQLPEKYKEI FFDQSKNGYA GYIDGGASQE EFYKFIKPIL EKMDGTEELL
VKLNREDLLR KQRTFDNGSI PHQIHLGELH AILRRQEDFY PFLKDNREKI EKILTFRIPY
YVGPLARGNS RFAWMTRKSE ETITPWNFEE VVDKGASAQS FIERMTNFDK NLPNEKVLPK
HSLLYEYFTV YNELTKVKYV TEGMRKPAFL SGEQKKAIVD LLFKTNRKVT
VKQLKEDYFK KIECFDSVEI SGVEDRFNAS LGTYHDLLKI IKDKDFLDNE ENEDILEDIV
LTLTLFEDRE MIEERLKTYA HLFDDKVMKQ LKRRRYTGWG RLSRKLINGI RDKQSGKTIL
DFLKSDGFAN RNFMQLIHDD SLTFKEDIQK AQVSGQGDSL HEHIANLAGS PAIKKGILQT
VKVVDELVKV MGRHKPENIV IEMARENQTT QKGQKNSRER MKRIEEGIKE LGSQILKEHP
VENTQLQNEK LYLYYLQNGR DMYVDQELDI NRLSDYDVDH IVPQSFLKDD SIDNKVLTRS
DKNRGKSDNV PSEEVVKKMK NYWRQLLNAK LITQRKFDNL TKAERGGLSE
LDKAGFIKRQ LVETRQITKH VAQILDSRMN TKYDENDKLI REVKVITLKS KLVSDFRKDF
QFYKVREINN YHHAHDAYLN AVVGTALIKK YPKLESEFVY GDYKVYDVRK
MIAKSEQEIG KATAKYFFYS NIMNFFKTEI TLANGEIRKR PLIETNGETG EIVWDKGRDF
ATVRKVLSMP QVNIVKKTEV QTGGFSKESI LPKRNSDKLI ARKKDWDPKK YGGFDSPTVA
YSVLVVAKVE KGKSKKLKSV KELLGITIME RSSFEKNPID FLEAKGYKEV KKDLIIKLPK
YSLFELENGR KRMLASAGEL QKGNELALPS KYVNFLYLAS HYEKLKGSPE DNEQKQLFVE
QHKHYLDEII EQISEFSKRV ILADANLDKV LSAYNKHRDK PIREQAENII HLFTLTNLGA
PAAFKYFDTT IDRKRYTSTK EVLDATLIHQ SITGLYETRI DLSQLGGDGG GSPKKKRKV
iProt106520 (SEQ ID NO: 7824):
MAHHHHHHGG SPKKKRKVDK KYSIGLDIGT NSVGWAVITD EYKVPSKKFK
VLGNTDRHSI KKNLIGALLF DSGETAEATR LKRTARRRYT RRKNRICYLQ EIFSNEMAKV
DDSFFHRLEE SFLVEEDKKH ERHPIFGNIV DEVAYHEKYP TIYHLRKKLV DSTDKADLRL
IYLALAHMIK FRGHFLIEGD LNPDNSDVDK LFIQLVQTYN QLFEENPINA SGVDAKAILS
ARLSKSRRLE NLIAQLPGEK KNGLFGNLIA LSLGLTPNFK SNFDLAEDAK LQLSKDTYDD
DLDNLLAQIG DQYADLFLAA KNLSDAILLS DILRVNTEIT KAPLSASMIK RYDEHHQDLT
LLKALVRQQL PEKYKEIFFD QSKNGYAGYI DGGASQEEFY KFIKPILEKM DGTEELLVKL
NREDLLRKQR TFDNGSIPHQ IHLGELHAIL RRQEDFYPFL KDNREKIEKI LTFRIPYYVG
PLARGNSRFA WMTRKSEETI TPWNFEEVVD KGASAQSFIE RMTNFDKNLP NEKVLPKHSL
LYEYFTVYNE LTKVKYVTEG MRKPAFLSGE QKKAIVDLLF KTNRKVTVKQ LKEDYFKKIE
CFDSVEISGV EDRFNASLGT YHDLLKIIKD KDFLDNEENE DILEDIVLTL TLFEDREMIE
ERLKTYAHLF DDKVMKQLKR RRYTGWGRLS RKLINGIRDK QSGKTILDFL KSDGFANRNF
MQLIHDDSLT FKEDIQKAQV SGQGDSLHEH IANLAGSPAI KKGILQTVKV VDELVKVMGR
HKPENIVIEM ARENQTTQKG QKNSRERMKR IEEGIKELGS QILKEHPVEN TQLQNEKLYL
YYLQNGRDMY VDQELDINRL SDYDVDHIVP QSFLKDDSID NKVLTRSDKN RGKSDNVPSE
EVVKKMKNYW RQLLNAKLIT QRKFDNLTKA ERGGLSELDK AGFIKRQLVE
TRQITKHVAQ ILDSRMNTKY DENDKLIREV KVITLKSKLV SDFRKDFQFY KVREINNYHH
AHDAYLNAVV GTALIKKYPK LESEFVYGDY KVYDVRKMIA KSEQEIGKAT
AKYFFYSNIM NFFKTEITLA NGEIRKRPLI ETNGETGEIV WDKGRDFATV RKVLSMPQVN
IVKKTEVQTG GFSKESILPK RNSDKLIARK KDWDPKKYGG FDSPTVAYSV LVVAKVEKGK
SKKLKSVKEL LGITIMERSS FEKNPIDFLE AKGYKEVKKD LIIKLPKYSL FELENGRKRM
LASAGELQKG NELALPSKYV NFLYLASHYE KLKGSPEDNE QKQLFVEQHK HYLDEIIEQI
SEFSKRVILA DANLDKVLSA YNKHRDKPIR EQAENIIHLF TLTNLGAPAA FKYFDTTIDR
KRYTSTKEVL DATLIHQSIT GLYETRIDLS QLGGDSRADP KKKRKV
iProt106521 (SEQ ID NO: 7825):
MAPKKKRKVD KKYSIGLDIG TNSVGWAVIT DEYKVPSKKF KVLGNTDRHS IKKNLIGALL
FDSGETAEAT RLKRTARRRY TRRKNRICYL QEIFSNEMAK VDDSFFHRLE ESFLVEEDKK
HERHPIFGNI VDEVAYHEKY PTIYHLRKKL VDSTDKADLR LIYLALAHMI KFRGHFLIEG
DLNPDNSDVD KLFIQLVQTY NQLFEENPIN ASGVDAKAIL SARLSKSRRL ENLIAQLPGE
KKNGLFGNLI ALSLGLTPNF KSNFDLAEDA KLQLSKDTYD DDLDNLLAQI GDQYADLFLA
AKNLSDAILL SDILRVNTEI TKAPLSASMI KRYDEHHQDL TLLKALVRQQ LPEKYKEIFF
DQSKNGYAGY IDGGASQEEF YKFIKPILEK MDGTEELLVK LNREDLLRKQ RTFDNGSIPH
QIHLGELHAI LRRQEDFYPF LKDNREKIEK ILTFRIPYYV GPLARGNSRF AWMTRKSEET
ITPWNFEEVV DKGASAQSFI ERMTNFDKNL PNEKVLPKHS LLYEYFTVYN ELTKVKYVTE
GMRKPAFLSG EQKKAIVDLL FKTNRKVTVK QLKEDYFKKI ECFDSVEISG VEDRFNASLG
TYHDLLKIIK DKDFLDNEEN EDILEDIVLT LTLFEDREMI EERLKTYAHL FDDKVMKQLK
RRRYTGWGRL SRKLINGIRD KQSGKTILDF LKSDGFANRN FMQLIHDDSL TFKEDIQKAQ
VSGQGDSLHE HIANLAGSPA IKKGILQTVK VVDELVKVMG RHKPENIVIE MARENQTTQK
GQKNSRERMK RIEEGIKELG SQILKEHPVE NTQLQNEKLY LYYLQNGRDM YVDQELDINR
LSDYDVDHIV PQSFLKDDSI DNKVLTRSDK NRGKSDNVPS EEVVKKMKNY
WRQLLNAKLI TQRKFDNLTK AERGGLSELD KAGFIKRQLV ETRQITKHVA QILDSRMNTK
YDENDKLIRE VKVITLKSKL VSDFRKDFQF YKVREINNYH HAHDAYLNAV VGTALIKKYP
KLESEFVYGD YKVYDVRKMI AKSEQEIGKA TAKYFFYSNI MNFFKTEITL ANGEIRKRPL
IETNGETGEI VWDKGRDFAT VRKVLSMPQV NIVKKTEVQT GGFSKESILP KRNSDKLIAR
KKDWDPKKYG GFDSPTVAYS VLVVAKVEKG KSKKLKSVKE LLGITIMERS SFEKNPIDFL
EAKGYKEVKK DLIIKLPKYS LFELENGRKR MLASAGELQK GNELALPSKY VNFLYLASHY
EKLKGSPEDN EQKQLFVEQH KHYLDEIIEQ ISEFSKRVIL ADANLDKVLS AYNKHRDKPI
REQAENIIHL FTLTNLGAPA AFKYFDTTID RKRYTSTKEV LDATLIHQSI TGLYETRIDL
SQLGGDSRAD HHHHHH
iProt106522 (SEQ ID NO: 7826):
MAHHHHHHGG SDKKYSIGLD IGTNSVGWAV ITDEYKVPSK KFKVLGNTDR HSIKKNLIGA
LLFDSGETAE ATRLKRTARR RYTRRKNRIC YLQEIFSNEM AKVDDSFFHR LEESFLVEED
KKHERHPIFG NIVDEVAYHE KYPTIYHLRK KLVDSTDKAD LRLIYLALAH MIKFRGHFLI
EGDLNPDNSD VDKLFIQLVQ TYNQLFEENP INASGVDAKA ILSARLSKSR RLENLIAQLP
GEKKNGLFGN LIALSLGLTP NFKSNFDLAE DAKLQLSKDT YDDDLDNLLA QIGDQYADLF
LAAKNLSDAI LLSDILRVNT EITKAPLSAS MIKRYDEHHQ DLTLLKALVR QQLPEKYKEI
FFDQSKNGYA GYIDGGASQE EFYKFIKPIL EKMDGTEELL VKLNREDLLR KQRTFDNGSI
PHQIHLGELH AILRRQEDFY PFLKDNREKI EKILTFRIPY YVGPLARGNS RFAWMTRKSE
ETITPWNFEE VVDKGASAQS FIERMTNFDK NLPNEKVLPK HSLLYEYFTV YNELTKVKYV
TEGMRKPAFL SGEQKKAIVD LLFKTNRKVT VKQLKEDYFK KIECFDSVEI SGVEDRFNAS
LGTYHDLLKI IKDKDFLDNE ENEDILEDIV LTLTLFEDRE MIEERLKTYA HLFDDKVMKQ
LKRRRYTGWG RLSRKLINGI RDKQSGKTIL DFLKSDGFAN RNFMQLIHDD SLTFKEDIQK
AQVSGQGDSL HEHIANLAGS PAIKKGILQT VKVVDELVKV MGRHKPENIV IEMARENQTT
QKGQKNSRER MKRIEEGIKE LGSQILKEHP VENTQLQNEK LYLYYLQNGR DMYVDQELDI
NRLSDYDVDH IVPQSFLKDD SIDNKVLTRS DKNRGKSDNV PSEEVVKKMK
NYWRQLLNAK LITQRKFDNL TKAERGGLSE LDKAGFIKRQ LVETRQITKH VAQILDSRMN
TKYDENDKLI REVKVITLKS KLVSDFRKDF QFYKVREINN YHHAHDAYLN AVVGTALIKK
YPKLESEFVY GDYKVYDVRK MIAKSEQEIG KATAKYFFYS NIMNFFKTEI TLANGEIRKR
PLIETNGETG EIVWDKGRDF ATVRKVLSMP QVNIVKKTEV QTGGFSKESI LPKRNSDKLI
ARKKDWDPKK YGGFDSPTVA YSVLVVAKVE KGKSKKLKSV KELLGITIME RSSFEKNPID
FLEAKGYKEV KKDLIIKLPK YSLFELENGR KRMLASAGEL QKGNELALPS KYVNFLYLAS
HYEKLKGSPE DNEQKQLFVE QHKHYLDEII EQISEFSKRV ILADANLDKV LSAYNKHRDK
PIREQAENII HLFTLTNLGA PAAFKYFDTT IDRKRYTSTK EVLDATLIHQ SITGLYETRI
DLSQLGGDSR ADPKKKRKV
iProt106658 (SEQ ID NO: 7827):
MGSSHHHHHH HHENLYFQGS MDKKYSIGLD IGTNSVGWAV ITDEYKVPSK
KFKVLGNTDR HSIKKNLIGA LLFDSGETAE ATRLKRTARR RYTRRKNRIC YLQEIFSNEM
AKVDDSFFHR LEESFLVEED KKHERHPIFG NIVDEVAYHE KYPTIYHLRK KLVDSTDKAD
LRLIYLALAH MIKFRGHFLI EGDLNPDNSD VDKLFIQLVQ TYNQLFEENP INASGVDAKA
ILSARLSKSR RLENLIAQLP GEKKNGLFGN LIALSLGLTP NFKSNFDLAE DAKLQLSKDT
YDDDLDNLLA QIGDQYADLF LAAKNLSDAI LLSDILRVNT EITKAPLSAS MIKRYDEHHQ
DLTLLKALVR QQLPEKYKEI FFDQSKNGYA GYIDGGASQE EFYKFIKPIL EKMDGTEELL
VKLNREDLLR KQRTFDNGSI PHQIHLGELH AILRRQEDFY PFLKDNREKI EKILTFRIPY
YVGPLARGNS RFAWMTRKSE ETITPWNFEE VVDKGASAQS FIERMTNFDK NLPNEKVLPK
HSLLYEYFTV YNELTKVKYV TEGMRKPAFL SGEQKKAIVD LLFKTNRKVT
VKQLKEDYFK KIECFDSVEI SGVEDRFNAS LGTYHDLLKI IKDKDFLDNE ENEDILEDIV
LTLTLFEDRE MIEERLKTYA HLFDDKVMKQ LKRRRYTGWG RLSRKLINGI RDKQSGKTIL
DFLKSDGFAN RNFMQLIHDD SLTFKEDIQK AQVSGQGDSL HEHIANLAGS PAIKKGILQT
VKVVDELVKV MGRHKPENIV IEMARENQTT QKGQKNSRER MKRIEEGIKE LGSQILKEHP
VENTQLQNEK LYLYYLQNGR DMYVDQELDI NRLSDYDVDH IVPQSFLKDD SIDNKVLTRS
DKNRGKSDNV PSEEVVKKMK NYWRQLLNAK LITQRKFDNL TKAERGGLSE
LDKAGFIKRQ LVETRQITKH VAQILDSRMN TKYDENDKLI REVKVITLKS KLVSDFRKDF
QFYKVREINN YHHAHDAYLN AVVGTALIKK YPKLESEFVY GDYKVYDVRK
MIAKSEQEIG KATAKYFFYS NIMNFFKTEI TLANGEIRKR PLIETNGETG EIVWDKGRDF
ATVRKVLSMP QVNIVKKTEV QTGGFSKESI LPKRNSDKLI ARKKDWDPKK YGGFDSPTVA
YSVLVVAKVE KGKSKKLKSV KELLGITIME RSSFEKNPID FLEAKGYKEV KKDLIIKLPK
YSLFELENGR KRMLASAGEL QKGNELALPS KYVNFLYLAS HYEKLKGSPE DNEQKQLFVE
QHKHYLDEII EQISEFSKRV ILADANLDKV LSAYNKHRDK PIREQAENII HLFTLTNLGA
PAAFKYFDTT IDRKRYTSTK EVLDATLIHQ SITGLYETRI DLSQLGGDGG GSPKKKRKV
iProt106745 (SEQ ID NO: 7828):
MAPKKKRKVD KKYSIGLDIG TNSVGWAVIT DEYKVPSKKF KVLGNTDRHS IKKNLIGALL
FDSGETAEAT RLKRTARRRY TRRKNRICYL QEIFSNEMAK VDDSFFHRLE ESFLVEEDKK
HERHPIFGNI VDEVAYHEKY PTIYHLRKKL VDSTDKADLR LIYLALAHMI KFRGHFLIEG
DLNPDNSDVD KLFIQLVQTY NQLFEENPIN ASGVDAKAIL SARLSKSRRL ENLIAQLPGE
KKNGLFGNLI ALSLGLTPNF KSNFDLAEDA KLQLSKDTYD DDLDNLLAQI GDQYADLFLA
AKNLSDAILL SDILRVNTEI TKAPLSASMI KRYDEHHQDL TLLKALVRQQ LPEKYKEIFF
DQSKNGYAGY IDGGASQEEF YKFIKPILEK MDGTEELLVK LNREDLLRKQ RTFDNGSIPH
QIHLGELHAI LRRQEDFYPF LKDNREKIEK ILTFRIPYYV GPLARGNSRF AWMTRKSEET
ITPWNFEEVV DKGASAQSFI ERMTNFDKNL PNEKVLPKHS LLYEYFTVYN ELTKVKYVTE
GMRKPAFLSG EQKKAIVDLL FKTNRKVTVK QLKEDYFKKI ECFDSVEISG VEDRFNASLG
TYHDLLKIIK DKDFLDNEEN EDILEDIVLT LTLFEDREMI EERLKTYAHL FDDKVMKQLK
RRRYTGWGRL SRKLINGIRD KQSGKTILDF LKSDGFANRN FMQLIHDDSL TFKEDIQKAQ
VSGQGDSLHE HIANLAGSPA IKKGILQTVK VVDELVKVMG RHKPENIVIE MARENQTTQK
GQKNSRERMK RIEEGIKELG SQILKEHPVE NTQLQNEKLY LYYLQNGRDM YVDQELDINR
LSDYDVDHIV PQSFLKDDSI DNAVLTRSDK NRGKSDNVPS EEVVKKMKNY
WRQLLNAKLI TQRKFDNLTK AERGGLSELD KAGFIKRQLV ETRQITKHVA QILDSRMNTK
YDENDKLIRE VKVITLKSKL VSDFRKDFQF YKVREINNYH HAHDAYLNAV VGTALIKKYP
KLESEFVYGD YKVYDVRKMI AKSEQEIGKA TAKYFFYSNI MNFFKTEITL ANGEIRKRPL
IETNGETGEI VWDKGRDFAT VRKVLSMPQV NIVKKTEVQT GGFSKESILP KRNSDKLIAR
KKDWDPKKYG GFDSPTVAYS VLVVAKVEKG KSKKLKSVKE LLGITIMERS SFEKNPIDFL
EAKGYKEVKK DLIIKLPKYS LFELENGRKR MLASAGELQK GNELALPSKY VNFLYLASHY
EKLKGSPEDN EQKQLFVEQH KHYLDEIIEQ ISEFSKRVIL ADANLDKVLS AYNKHRDKPI
REQAENIIHL FTLTNLGAPA AFKYFDTTID RKRYTSTKEV LDATLIHQSI TGLYETRIDL
SQLGGDSRAD PKKKRKVHHH HHH
iProt106746 (SEQ ID NO: 7829):
MAPKKKRKVD KKYSIGLDIG TNSVGWAVIT DEYKVPSKKF KVLGNTDRHS IKKNLIGALL
FDSGETAEAT RLKRTARRRY TRRKNRICYL QEIFSNEMAK VDDSFFHRLE ESFLVEEDKK
HERHPIFGNI VDEVAYHEKY PTIYHLRKKL VDSTDKADLR LIYLALAHMI KFRGHFLIEG
DLNPDNSDVD KLFIQLVQTY NQLFEENPIN ASGVDAKAIL SARLSKSRRL ENLIAQLPGE
KKNGLFGNLI ALSLGLTPNF KSNFDLAEDA KLQLSKDTYD DDLDNLLAQI GDQYADLFLA
AKNLSDAILL SDILRVNTEI TKAPLSASMI KRYDEHHQDL TLLKALVRQQ LPEKYKEIFF
DQSKNGYAGY IDGGASQEEF YKFIKPILEK MDGTEELLVK LNREDLLRKQ RTFDNGSIPH
QIHLGELHAI LRRQEDFYPF LKDNREKIEK ILTFRIPYYV GPLARGNSRF AWMTRKSEET
ITPWNFEEVV DKGASAQSFI ERMTNFDKNL PNEKVLPKHS LLYEYFTVYN ELTKVKYVTE
GMRKPAFLSG EQKKAIVDLL FKTNRKVTVK QLKEDYFKKI ECFDSVEISG VEDRFNASLG
TYHDLLKIIK DKDFLDNEEN EDILEDIVLT LTLFEDREMI EERLKTYAHL FDDKVMKQLK
RRRYTGWGRL SRKLINGIRD KQSGKTILDF LKSDGFANRN FMQLIHDDSL TFKEDIQKAQ
VSGQGDSLHE HIANLAGSPA IKKGILQTVK VVDELVKVMG RHKPENIVIE MARENQTTQK
GQKNSRERMK RIEEGIKELG SQILKEHPVE NTQLQNEALY LYYLQNGRDM YVDQELDINR
LSDYDVDHIV PQSFLKDDSI DNKVLTRSDK NRGKSDNVPS EEVVKKMKNY
WRQLLNAKLI TQRKFDNLTK AERGGLSELD KAGFIKRQLV ETRQITKHVA QILDSRMNTK
YDENDKLIRE VKVITLKSKL VSDFRKDFQF YKVREINNYH HAHDAYLNAV VGTALIKKYP
ALESEFVYGD YKVYDVRKMI AKSEQEIGKA TAKYFFYSNI MNFFKTEITL ANGEIRKAPL
IETNGETGEI VWDKGRDFAT VRKVLSMPQV NIVKKTEVQT GGFSKESILP KRNSDKLIAR
KKDWDPKKYG GFDSPTVAYS VLVVAKVEKG KSKKLKSVKE LLGITIMERS SFEKNPIDFL
EAKGYKEVKK DLIIKLPKYS LFELENGRKR MLASAGELQK GNELALPSKY VNFLYLASHY
EKLKGSPEDN EQKQLFVEQH KHYLDEIIEQ ISEFSKRVIL ADANLDKVLS AYNKHRDKPI
REQAENIIHL FTLTNLGAPA AFKYFDTTID RKRYTSTKEV LDATLIHQSI TGLYETRIDL
SQLGGDSRAD PKKKRKVHHH HHH
iProt106747 (SEQ ID NO: 7830):
MAPKKKRKVD KKYSIGLDIG TNSVGWAVIT DEYKVPSKKF KVLGNTDRHS IKKNLIGALL
FDSGETAEAT RLKRTARRRY TRRKNRICYL QEIFSNEMAK VDDSFFHRLE ESFLVEEDKK
HERHPIFGNI VDEVAYHEKY PTIYHLRKKL VDSTDKADLR LIYLALAHMI KFRGHFLIEG
DLNPDNSDVD KLFIQLVQTY NQLFEENPIN ASGVDAKAIL SARLSKSRRL ENLIAQLPGE
KKNGLFGNLI ALSLGLTPNF KSNFDLAEDA KLQLSKDTYD DDLDNLLAQI GDQYADLFLA
AKNLSDAILL SDILRVNTEI TKAPLSASMI KRYDEHHQDL TLLKALVRQQ LPEKYKEIFF
DQSKNGYAGY IDGGASQEEF YKFIKPILEK MDGTEELLVK LNREDLLRKQ RTFDNGSIPH
QIHLGELHAI LRRQEDFYPF LKDNREKIEK ILTFRIPYYV GPLARGNSRF AWMTRKSEET
ITPWNFEEVV DKGASAQSFI ERMTNFDKNL PNEKVLPKHS LLYEYFTVYN ELTKVKYVTE
GMRKPAFLSG EQKKAIVDLL FKTNRKVTVK QLKEDYFKKI ECFDSVEISG VEDRFNASLG
TYHDLLKIIK DKDFLDNEEN EDILEDIVLT LTLFEDREMI EERLKTYAHL FDDKVMKQLK
RRRYTGWGRL SRKLINGIRD KQSGKTILDF LKSDGFANRN FMQLIHDDSL TFKEDIQKAQ
VSGQGDSLHE HIANLAGSPA IKKGILQTVK VVDELVKVMG RHKPENIVIE MARENQTTQK
GQKNSRERMK RIEEGIKELG SQILKEHPVE NTQLQNEKLY LYYLQNGRDM YVDQELDINR
LSDYDVDHIV PQSFLADDSI DNKVLTRSDK NRGKSDNVPS EEVVKKMKNY
WRQLLNAKLI TQRKFDNLTK AERGGLSELD KAGFIKRQLV ETRQITKHVA QILDSRMNTK
YDENDKLIRE VKVITLKSKL VSDFRKDFQF YKVREINNYH HAHDAYLNAV VGTALIKKYP
ALESEFVYGD YKVYDVRKMI AKSEQEIGKA TAKYFFYSNI MNFFKTEITL ANGEIRKAPL
IETNGETGEI VWDKGRDFAT VRKVLSMPQV NIVKKTEVQT GGFSKESILP KRNSDKLIAR
KKDWDPKKYG GFDSPTVAYS VLVVAKVEKG KSKKLKSVKE LLGITIMERS SFEKNPIDFL
EAKGYKEVKK DLIIKLPKYS LFELENGRKR MLASAGELQK GNELALPSKY VNFLYLASHY
EKLKGSPEDN EQKQLFVEQH KHYLDEIIEQ ISEFSKRVIL ADANLDKVLS AYNKHRDKPI
REQAENIIHL FTLTNLGAPA AFKYFDTTID RKRYTSTKEV LDATLIHQSI TGLYETRIDL
SQLGGDSRAD PKKKRKVHHH HHH
iProt106884 (SEQ ID NO: 7831):
MAPKKKRKVD KKYSIGLDIG TNSVGWAVIT DEYKVPSKKF KVLGNTDRHS IKKNLIGALL
FDSGETAEAT RLKRTARRRY TRRKNRICYL QEIFSNEMAK VDDSFFHRLE ESFLVEEDKK
HERHPIFGNI VDEVAYHEKY PTIYHLRKKL VDSTDKADLR LIYLALAHMI KFRGHFLIEG
DLNPDNSDVD KLFIQLVQTY NQLFEENPIN ASGVDAKAIL SARLSKSRRL ENLIAQLPGE
KKNGLFGNLI ALSLGLTPNF KSNFDLAEDA KLQLSKDTYD DDLDNLLAQI GDQYADLFLA
AKNLSDAILL SDILRVNTEI TKAPLSASMI KRYDEHHQDL TLLKALVRQQ LPEKYKEIFF
DQSKNGYAGY IDGGASQEEF YKFIKPILEK MDGTEELLVK LNREDLLRKQ RTFDNGSIPH
QIHLGELHAI LRRQEDFYPF LKDNREKIEK ILTFRIPYYV GPLARGNSRF AWMTRKSEET
ITPWNFEEVV DKGASAQSFI ERMTAFDKNL PNEKVLPKHS LLYEYFTVYN ELTKVKYVTE
GMRKPAFLSG EQKKAIVDLL FKTNRKVTVK QLKEDYFKKI ECFDSVEISG VEDRFNASLG
TYHDLLKIIK DKDFLDNEEN EDILEDIVLT LTLFEDREMI EERLKTYAHL FDDKVMKQLK
RRRYTGWGAL SRKLINGIRD KQSGKTILDF LKSDGFANRN FMALIHDDSL TFKEDIQKAQ
VSGQGDSLHE HIANLAGSPA IKKGILQTVK VVDELVKVMG RHKPENIVIE MARENQTTQK
GQKNSRERMK RIEEGIKELG SQILKEHPVE NTQLQNEKLY LYYLQNGRDM YVDQELDINR
LSDYDVDHIV PQSFLKDDSI DNKVLTRSDK NRGKSDNVPS EEVVKKMKNY
WRQLLNAKLI TQRKFDNLTK AERGGLSELD KAGFIKRQLV ETRAITKHVA QILDSRMNTK
YDENDKLIRE VKVITLKSKL VSDFRKDFQF YKVREINNYH HAHDAYLNAV VGTALIKKYP
KLESEFVYGD YKVYDVRKMI AKSEQEIGKA TAKYFFYSNI MNFFKTEITL ANGEIRKRPL
IETNGETGEI VWDKGRDFAT VRKVLSMPQV NIVKKTEVQT GGFSKESILP KRNSDKLIAR
KKDWDPKKYG GFDSPTVAYS VLVVAKVEKG KSKKLKSVKE LLGITIMERS SFEKNPIDFL
EAKGYKEVKK DLIIKLPKYS LFELENGRKR MLASAGELQK GNELALPSKY VNFLYLASHY
EKLKGSPEDN EQKQLFVEQH KHYLDEIIEQ ISEFSKRVIL ADANLDKVLS AYNKHRDKPI
REQAENIIHL FTLTNLGAPA AFKYFDTTID RKRYTSTKEV LDATLIHQSI TGLYETRIDL
SQLGGDSRAD PKKKRKVHHH HHH

### Nucleic Acids Encoding Cas9 Molecules

[0423] Nucleic acids encoding the Cas9 molecules, e.g., an active Cas9 molecule or an inactive Cas9 molecule are provided herein.

[0424] Exemplary nucleic acids encoding Cas9 molecules are described in Cong et al, SCIENCE 2013, 399(6121):819-823; Wang et al, CELL 2013, 153(4):910-918; Mali et al., SCIENCE 2013, 399(6121):823-826; Jinek et al, SCIENCE 2012, 337(6096):816-821.

[0425] In an embodiment, a nucleic acid encoding a Cas9 molecule can be a synthetic nucleic acid sequence. For example, the synthetic nucleic acid molecule can be chemically modified, e.g., as described in Section XIII. In an embodiment, the Cas9 mRNA has one or more of, e.g., all of the following properties: it is capped, polyadenylated, substituted with 5-methylcytidine and/or pseudouridine.

[0426] In addition or alternatively, the synthetic nucleic acid sequence can be codon optimized, e.g., at least one non-common codon or less-common codon has been replaced by a common codon. For example, the synthetic nucleic acid can direct the synthesis of an optimized messenger mRNA, e.g., optimized for expression in a mammalian expression system, e.g., described herein.

[0427] Provided below is an exemplary codon optimized nucleic acid sequence encoding a Cas9 molecule of S. pyogenes.

| (SEQ ID NO: 6628) | |
|---|---|
| atggataaaa agtacagcat cgggctggac atcggtacaa actcagtggg gtgggccgtg | 60 |
| attacggacg agtacaaggt accctccaaa aaatttaaag tgctgggtaa cacggacaga | 120 |
| cactctataa agaaaaatct tattggagcc ttgctgttcg actcaggcga gacagccgaa | 180 |
| gccacaaggt tgaagcggac cgccaggagg cggtatacca ggagaaagaa ccgcatatgc | 240 |
| tacctgcaag aaatcttcag taacgagatg gcaaaggttg acgatagctt tttccatcgc | 300 |
| ctggaagaat cctttcttgt tgaggaagac aagaagcacg aacggcaccc catctttggc | 360 |
| aatattgtcg acgaagtggc atatcacgaa aagtacccga ctatctacca cctcaggaag | 420 |
| aagctggtgg actctaccga taaggcggac ctcagactta tttatttggc actcgcccac | 480 |
| atgattaaat ttagaggaca tttcttgatc gagggcgacc tgaacccgga caacagtgac | 540 |
| gtcgataagc tgttcatcca acttgtgcag acctacaatc aactgttcga agaaaaccct | 600 |
| ataaatgctt caggagtcga cgctaaagca atcctgtccg cgcgcctctc aaaatctaga | 660 |
| agacttgaga atctgattgc tcagttgccc ggggaaaaga aaaatggatt gtttggcaac | 720 |
| ctgatcgccc tcagtctcgg actgacccca aatttcaaaa gtaacttcga cctggccgaa | 780 |
| gacgctaagc tccagctgtc caaggacaca tacgatgacg acctcgacaa tctgctggcc | 840 |
| cagattgggg atcagtacgc cgatctcttt ttggcagcaa agaacctgtc cgacgccatc | 900 |
| ctgttgagcg atatcttgag agtgaacacc gaaattacta aagcacccct tagcgcatct | 960 |
| atgatcaagc ggtacgacga gcatcatcag gatctgaccc tgctgaaggc tcttgtgagg | 1020 |
| caacagctcc ccgaaaaata caaggaaatc ttctttgacc agagcaaaaa cggctacgct | 1080 |
| ggctatatag atggtggggc cagtcaggag gaattctata aattcatcaa gcccattctc | 1140 |
| gagaaaatgg acggcacaga ggagttgctg gtcaaactta acagggagga cctgctgcgg | 1200 |
| aagcagcgga cctttgacaa cgggtctatc ccccaccaga ttcatctggg cgaactgcac | 1260 |
| gcaatcctga ggaggcagga ggatttttat ccttttctta aagataaccg cgagaaaata | 1320 |
| gaaaagattc ttacattcag gatcccgtac tacgtgggac ctctcgcccg gggcaattca | 1380 |
| cggtttgcct ggatgacaag gaagtcagag gagactatta caccttggaa cttcgaagaa | 1440 |
| gtggtggaca agggtgcatc tgcccagtct ttcatcgagc ggatgacaaa ttttgacaag | 1500 |
| aacctcccta atgagaaggt gctgcccaaa cattctctgc tctacgagta ctttaccgtc | 1560 |
| tacaatgaac tgactaaagt caagtacgtc accgagggaa tgaggaagcc ggcattcctt | 1620 |
| agtggagaac agaagaaggc gattgtagac ctgttgttca agaccaacag gaaggtgact | 1680 |
| gtgaagcaac ttaaagaaga ctactttaag aagatcgaat gttttgacag tgtggaaatt | 1740 |
| tcaggggttg aagaccgctt caatgcgtca ttggggactt accatgatct tctcaagatc | 1800 |
| ataaaggaca aagacttcct ggacaacgaa gaaaatgagg atattctcga agacatcgtc | 1860 |
| ctcaccctga ccctgttcga agacagggaa atgatagaag agcgcttgaa aacctatgcc | 1920 |
| cacctcttcg acgataaagt tatgaagcag ctgaagcgca ggagatacac aggatgggga | 1980 |
| agattgtcaa ggaagctgat caatggaatt agggataaac agagtggcaa gaccatactg | 2040 |
| gatttcctca aatctgatgg cttcgccaat aggaacttca tgcaactgat tcacgatgac | 2100 |
| tctcttacct tcaaggagga cattcaaaag gctcaggtga gcgggcaggg agactccctt | 2160 |
| catgaacaca tcgcgaattt ggcaggttcc cccgctatta aaaagggcat ccttcaaact | 2220 |
| gtcaaggtgg tggatgaatt ggtcaaggta atgggcagac ataagccaga aaatattgtg | 2280 |
| atcgagatgg cccgcgaaaa ccagaccaca cagaagggcc agaaaaatag tagagagcgg | 2340 |
| atgaagagga tcgaggaggg catcaaagag ctgggatctc agattctcaa agaacacccc | 2400 |
| gtagaaaaca cacagctgca gaacgaaaaa ttgtacttgt actatctgca gaacggcaga | 2460 |
| gacatgtacg tcgaccaaga acttgatatt aatagactgt ccgactatga cgtagaccat | 2520 |
| atcgtgcccc agtccttcct gaaggacgac tccattgata acaaagtctt gacaagaagc | 2580 |
| gacaagaaca ggggtaaaag tgataatgtg cctagcgagg aggtggtgaa aaaaatgaag | 2640 |
| aactactggc gacagctgct taatgcaaag ctcattacac aacggaagtt cgataatctg | 2700 |
| acgaaagcag agagaggtgg cttgtctgag ttggacaagg cagggtttat taagcggcag | 2760 |
| ctggtggaaa ctaggcagat cacaaagcac gtggcgcaga ttttggacag ccggatgaac | 2820 |
| acaaaatacg acgaaaatga taaactgata cgagaggtca aagttatcac gctgaaaagc | 2880 |
| aagctggtgt ccgattttcg gaaagacttc cagttctaca aagttcgcga gattaataac | 2940 |
| taccatcatg ctcacgatgc gtacctgaac gctgttgtcg ggaccgcctt gataaagaag | 3000 |
| tacccaaagc tggaatccga gttcgtatac ggggattaca aagtgtacga tgtgaggaaa | 3060 |
| atgatagcca agtccgagca ggagattgga aaggccacag ctaagtactt cttttattct | 3120 |
| aacatcatga atttttttaa gacggaaatt accctggcca acggagagat cagaaagcgg | 3180 |
| ccccttatag agacaaatgg tgaaacaggt gaaatcgtct gggataaggg cagggatttc | 3240 |
| gctactgtga ggaaggtgct gagtatgcca caggtaaata tcgtgaaaaa aaccgaagta | 3300 |
| cagaccggag gattttccaa ggaaagcatt ttgcctaaaa gaaactcaga caagctcatc | 3360 |
| gcccgcaaga aagattggga ccctaagaaa tacgggggat ttgactcacc caccgtagcc | 3420 |
| tattctgtgc tggtggtagc taaggtggaa aaaggaaagt ctaagaagct gaagtccgtg | 3480 |
| aaggaactct tgggaatcac tatcatggaa agatcatcct ttgaaaagaa ccctatcgat | 3540 |
| ttcctggagg ctaagggtta caaggaggtc aagaaagacc tcatcattaa actgccaaaa | 3600 |
| tactctctct tcgagctgga aaatggcagg aagagaatgt tggccagcgc cggagagctg | 3660 |
| caaaagggaa acgagcttgc tctgccctcc aaatatgtta attttctcta tctcgcttcc | 3720 |
| cactatgaaa agctgaaagg gtctcccgaa gataacgagc agaagcagct gttcgtcgaa | 3780 |
| cagcacaagc actatctgga tgaaataatc gaacaaataa gcgagttcag caaaagggtt | 3840 |
| atcctggcgg atgctaattt ggacaaagta ctgtctgctt ataacaagca ccgggataag | 3900 |
| cctattaggg aacaagccga gaatataatt cacctcttta cactcacgaa tctcggagcc | 3960 |
| cccgccgcct tcaaatactt tgatacgact atcgaccgga aacggtatac cagtaccaaa | 4020 |
| gaggtcctcg atgccaccct catccaccag tcaattactg gcctgtacga aacacggatc | 4080 |
| gacctctctc aactgggcgg cgactag | 4107 |

[0428] If the above Cas9 sequences are fused with a peptide or polypeptide at the C-terminus (e.g., an inactive Cas9 fused with a transcription repressor at the C-terminus), it is understood that the stop codon will be removed.

### VI. Functional Analysis of Candidate Molecules

[0429] Candidate Cas9 molecules, candidate gRNA molecules, candidate Cas9 molecule/gRNA molecule complexes, can be evaluated by art-known methods or as described herein. For example, exemplary methods for evaluating the endonuclease activity of Cas9 molecule are described, e.g., in Jinek el al., SCIENCE 2012; 337(6096):816-821.

### VII. Template Nucleic Acids (For Introduction of Nucleic Acids)

[0430] The term “template nucleic acid” or “donor template” as used herein refers to a nucleic acid to be inserted at or near a target sequence that has been modified, e.g., cleaved, by a CRISPR system of the present invention. In an embodiment, nucleic acid sequence at or near the target sequence is modified to have some or all of the sequence of the template nucleic acid, typically at or near cleavage site(s). In an embodiment, the template nucleic acid is single stranded. In an alternate embodiment, the template nucleic acid is double stranded. In an embodiment, the template nucleic acid is DNA, e.g., double stranded DNA. In an alternate embodiment, the template nucleic acid is single stranded DNA.

[0431] In embodiments, the template nucleic acid comprises sequence encoding a globin protein, e.g., a beta globin, e.g., comprises a beta globin gene. In an embodiment, the beta globin encoded by the nucleic acid comprises one or more mutations, e.g., anti-sickling mutations. In an embodiment, the beta globin encoded by the nucleic acid comprises the mutation T87Q. In an embodiment, the beta globin encoded by the nucleic acid comprises the mutation G16D. In an embodiment, the beta globin encoded by the nucleic acid comprises the mutation E22A. In an embodiment, the beta globin gene comprises the mutations G16D, E22A and T87Q. In embodiments, the template nucleic acid further comprises one or more regulatory elements, e.g., a promoter (e.g., a human beta globin promoter), a 3′ enhancer, and/or at least a portion of a globin locus control region (e.g., one or more DNAseI hypersensitivity sites (e.g., HS2, HS3 and/or HS4 of the human globin locus)).

[0432] In other embodiments, the template nucleic acid comprises sequence encoding a gamma globin, e.g., comprises a gamma globin gene. In embodiments, the template nucleic acid comprises sequence encoding more than one copy of a gamma globin protein, e.g., comprises two or more, e.g., two, gamma globin gene sequences. In embodiments, the template nucleic acid further comprises one or more regulatory elements, e.g., a promotor and/or enhancer.

[0433] In an embodiment, the template nucleic acid alters the structure of the target position by participating in a homology directed repair event. In an embodiment, the template nucleic acid alters the sequence of the target position. In an embodiment, the template nucleic acid results in the incorporation of a modified, or non-naturally occurring base into the target nucleic acid.

[0434] Mutations in a gene or pathway described herein may be corrected using one of the approaches discussed herein. In an embodiment, a mutation in a gene or pathway described herein is corrected by homology directed repair (HDR) using a template nucleic acid. In an embodiment, a mutation in a gene or pathway described herein is corrected by homologous recombination (HR) using a template nucleic acid. In an embodiment, a mutation in a gene or pathway described herein is corrected by Non-Homologous End Joining (NHEJ) repair using a template nucleic acid. In other embodiments, nucleic acid encoding molecules of interest may be inserted at or near a site modified by a CRISPR system of the present invention. In embodiments, the template nucleic acid comprises regulatory elements, e.g., one or more promotors and/or enhancers, operably linked to the nucleic acid sequence encoding a molecule of interest, e.g., as described herein.

### HDR or HR Repair and Template Nucleic Acids

[0435] As described herein, nuclease-induced homology directed repair (HDR) or homologous recombination (HR) can be used to alter a target sequence and correct (e.g., repair or edit) a mutation in the genome. While not wishing to be bound by theory, it is believed that alteration of the target sequence occurs by repair based on a donor template or template nucleic acid. For example, the donor template or the template nucleic acid provides for alteration of the target sequence. It is contemplated that a plasmid donor or linear double stranded template can be used as a template for homologous recombination. It is further contemplated that a single stranded donor template can be used as a template for alteration of the target sequence by alternate methods of homology directed repair (e.g., single strand annealing) between the target sequence and the donor template. Donor template-effected alteration of a target sequence may depend on cleavage by a Cas9 molecule. Cleavage by Cas9 can comprise a double strand break, one single strand break, or two single strand breaks.

[0436] In an embodiment, a mutation can be corrected by either a single double-strand break or two single strand breaks. In an embodiment, a mutation can be corrected by providing a template and a CRISPR/Cas9 system that creates (1) one double strand break, (2) two single strand breaks, (3) two double stranded breaks with a break occurring on each side of the target sequence, (4) one double stranded break and two single strand breaks with the double strand break and two single strand breaks occurring on each side of the target sequence, (5) four single stranded breaks with a pair of single stranded breaks occurring on each side of the target sequence, or (6) one single strand break.

### Double Strand Break Mediated Correction

[0437] In an embodiment, double strand cleavage is effected by a Cas9 molecule having cleavage activity associated with an HNH-like domain and cleavage activity associated with a RuvC-like domain, e.g., an N-terminal RuvC-like domain, e.g., a wild type Cas9. Such embodiments require only a single gRNA.

### Single Strand Break Mediated Correction

[0438] In other embodiments, two single strand breaks, or nicks, are effected by a Cas9 molecule having nickase activity, e.g., cleavage activity associated with an HNH-like domain or cleavage activity associated with an N-terminal RuvC-like domain Such embodiments require two gRNAs, one for placement of each single strand break. In an embodiment, the Cas9 molecule having nickase activity cleaves the strand to which the gRNA hybridizes, but not the strand that is complementary to the strand to which the gRNA hybridizes. In an embodiment, the Cas9 molecule having nickase activity does not cleave the strand to which the gRNA hybridizes, but rather cleaves the strand that is complementary to the strand to which the gRNA hybridizes.

[0439] In an embodiment, the nickase has HNH activity, e.g., a Cas9 molecule having the RuvC activity inactivated, e.g., a Cas9 molecule having a mutation at D10, e.g., the D10A mutation. D10A inactivates RuvC; therefore, the Cas9 nickase has (only) HN H activity and will cut on the strand to which the gRNA hybridizes (e.g., the complementary strand, which does not have the NGG PAM on it). In other embodiments, a Cas9 molecule having an H840, e.g., an H840A, mutation can be used as a nickase. H840A inactivates HNH; therefore, the Cas9 nickase has (only) RuvC activity and cuts on the non-complementary strand (e.g., the strand that has the NGG PAM and whose sequence is identical to the gRNA).

[0440] In an embodiment, in which a nickase and two gRNAs are used to position two single strand nicks, one nick is on the + strand and one nick is on the − strand of the target nucleic acid. The PAMs are outwardly facing. The gRNAs can be selected such that the gRNAs are separated by, from about 0-50, 0-100, or 0-200 nucleotides. In an embodiment, there is no overlap between the target sequence that is complementary to the targeting domains of the two gRNAs. In an embodiment, the gRNAs do not overlap and are separated by as much as 50, 100, or 200 nucleotides. In an embodiment, the use of two gRNAs can increase specificity, e.g., by decreasing off-target binding (Ran el cil., CELL 2013).

[0441] In an embodiment, a single nick can be used to induce HDR. It is contemplated herein that a single nick can be used to increase the ratio of HDR, HR or NHEJ at a given cleavage site.

### Placement of the Double Strand Break or a Single Strand Break Relative to Target Position

[0442] The double strand break or single strand break in one of the strands should be sufficiently close to target position such that correction occurs. In an embodiment, the distance is not more than 50, 100, 200, 300, 350 or 400 nucleotides. While not wishing to be bound by theory, it is believed that the break should be sufficiently close to target position such that the break is within the region that is subject to exonuclease-mediated removal during end resection. If the distance between the target position and a break is too great, the mutation may not be included in the end resection and, therefore, may not be corrected, as donor sequence may only be used to correct sequence within the end resection region.

[0443] In an embodiment, in which a gRNA (unimolecular (or chimeric) or modular gRNA) and Cas9 nuclease induce a double strand break for the purpose of inducing HDR- or HR-mediated correction, the cleavage site is between 0-200 bp (e.g., 0 to 175, 0 to 150, 0 to 125, 0 to 100, 0 to 75, 0 to 50, 0 to 25, 25 to 200, 25 to 175, 25 to 150, 25 to 125, 25 to 100, 25 to 75, 25 to 50, 50 to 200, 50 to 175, 50 to 150, 50 to 125, 50 to 100, 50 to 75, 75 to 200, 75 to 175, 75 to 150, 75 to 125, 75 to 100 bp) away from the target position. In an embodiment, the cleavage site is between 0-100 bp (e.g., 0 to 75, 0 to 50, 0 to 25, 25 to 100, 25 to 75, 25 to 50, 50 to 100, 50 to 75 or 75 to 100 bp) away from the target position.

[0444] In an embodiment, in which two gRNAs (independently, unimolecular (or chimeric) or modular gRNA) complexing with Cas9 nickases induce two single strand breaks for the purpose of inducing HDR-mediated correction, the closer nick is between 0-200 bp (e.g., 0 to 175, 0 to 150, 0 to 125, 0 to 100, 0 to 75, 0 to 50, 0 to 25, 25 to 200, 25 to 175, 25 to 150, 25 to 125, 25 to 100, 25 to 75, 25 to 50, 50 to 200, 50 to 175, 50 to 150, 50 to 125, 50 to 100, 50 to 75, 75 to 200, 75 to 175, 75 to 150, 75 to 125, 75 to 100 bp) away from the target position and the two nicks will ideally be within 25-55 bp of each other (e.g., 25 to 50, 25 to 45, 25 to 40, 25 to 35, 25 to 30, 30 to 55, 30 to 50, 30 to 45, 30 to 40, 30 to 35, 35 to 55, 35 to 50, 35 to 45, 35 to 40, 40 to 55, 40 to 50, 40 to 45 bp) and no more than 100 bp away from each other (e.g., no more than 90, 80, 70, 60, 50, 40, 30, 20, 10 or 5 bp away from each other). In an embodiment, the cleavage site is between 0-100 bp (e.g., 0 to 75, 0 to 50, 0 to 25, 25 to 100, 25 to 75, 25 to 50, 50 to 100, 50 to 75 or 75 to 100 bp) away from the target position.

[0445] In one embodiment, two gRNAs, e.g., independently, unimolecular (or chimeric) or modular gRNA, are configured to position a double-strand break on both sides of a target position. In an alternate embodiment, three gRNAs, e.g., independently, unimolecular (or chimeric) or modular gRNA, are configured to position a double strand break (i.e., one gRNA complexes with a Cas9 nuclease) and two single strand breaks or paired single stranded breaks (i.e., two gRNAs complex with Cas9 nickases) on either side of the target position (e.g., the first gRNA is used to target upstream (i.e., 5′) of the target position and the second gRNA is used to target downstream (i.e., 3′) of the target position). In another embodiment, four gRNAs, e.g., independently, unimolecular (or chimeric) or modular gRNA, are configured to generate two pairs of single stranded breaks (i.e., two pairs of two gRNAs complex with Cas9 nickases) on either side of the target position (e.g., the first gRNA is used to target upstream (i.e., 5′) of the target position and the second gRNA is used to target downstream (i.e., 3′) of the target position). The double strand break(s) or the closer of the two single strand nicks in a pair will ideally be within 0-500 bp of the target position (e.g., no more than 450, 400, 350, 300, 250, 200, 150, 100, 50 or 25 bp from the target position). When nickases are used, the two nicks in a pair are within 25-55 bp of each other (e.g., between 25 to 50, 25 to 45, 25 to 40, 25 to 35, 25 to 30, 50 to 55, 45 to 55, 40 to 55, 35 to 55, 30 to 55, 30 to 50, 35. to 50, 40 to 50, 45 to 50, 35 to 45, or 40 to 45 bp) and no more than 100 bp away from each other (e.g., no more than 90, 80, 70, 60, 50, 40, 30, 20 or 10 bp).

[0446] In one embodiment, two gRNAs, e.g., independently, unimolecular (or chimeric) or modular gRNA, are configured to position a double-strand break on both sides of a target position. In an alternate embodiment, three gRNAs, e.g., independently, unimolecular (or chimeric) or modular gRNA, are configured to position a double strand break (i.e., one gRNA complexes with a Cas9 nuclease) and two single strand breaks or paired single stranded breaks (i.e., two gRNAs complex with Cas9 nickases) on two target sequences (e.g., the first gRNA is used to target an upstream (i.e., 5′) target sequence and the second gRNA is used to target a downstream (i.e., 3′) target sequence of an insertion site. In another embodiment, four gRNAs, e.g., independently, unimolecular (or chimeric) or modular gRNA, are configured to generate two pairs of single stranded breaks (i.e., two pairs of two gRNAs complex with Cas9 nickases) on either side of an insertion site (e.g., the first gRNA is used to target an upstream (i.e., 5′) target sequence described herein, and the second gRNA is used to target a downstream (i.e., 3′) target sequence described herein). The double strand break(s) or the closer of the two single strand nicks in a pair will ideally be within 0-500 bp of the target position (e.g., no more than 450, 400, 350, 300, 250, 200, 150, 100, 50 or 25 bp from the target position). When nickases are used, the two nicks in a pair are within 25-55 bp of each other (e.g., between 25 to 50, 25 to 45, 25 to 40, 25 to 35, 25 to 30, 50 to 55, 45 to 55, 40 to 55, 35 to 55, 30 to 55, 30 to 50, 35 to 50, 40 to 50, 45 to 50, 35 to 45, or 40 to 45 bp) and no more than 100 bp away from each other (e.g., no more than 90, 80, 70, 60, 50, 40, 30, 20 or 10 bp).

### Length of the Homology Arms

[0447] The homology arm should extend at least as far as the region in which end resection may occur, e.g., in order to allow the resected single stranded overhang to find a complementary region within the donor template. The overall length could be limited by parameters such as plasmid size or viral packaging limits. In an embodiment, a homology arm does not extend into repeated elements, e.g., ALU repeats, LINE repeats. A template may have two homology arms of the same or different lengths.

### Exemplary Homology Arm Lengths Include at Least 25, 50, 100, 250, 500, 750 or 1000 Nucleotides.

[0448] Target position, as used herein, refers to a site on a target nucleic acid (e.g., the chromosome) that is modified by a Cas9 molecule-dependent process. For example, the target position can be a modified Cas9 molecule cleavage of the target nucleic acid and template nucleic acid directed modification, e.g., correction, of the target position. In an embodiment, a target position can be a site between two nucleotides, e.g., adjacent nucleotides, on the target nucleic acid into which one or more nucleotides is added. The target position may comprise one or more nucleotides that are altered, e.g., corrected, by a template nucleic acid. In an embodiment, the target position is within a target sequence (e.g., the sequence to which the gRN A binds) In an embodiment, a target position is upstream or downstream of a target sequence (e.g., the sequence to which the gRNA binds).

[0449] Typically, the template sequence undergoes a breakage mediated or catalyzed recombination with the target sequence. In an embodiment, the template nucleic acid includes sequence that corresponds to a site on the target sequence that is cleaved by a Cas9 mediated cleavage event. In an embodiment, the template nucleic acid includes sequence that corresponds to both, a first site on the target sequence that is cleaved in a first Cas9 mediated event, and a second site on the target sequence that is cleaved in a second Cas9 mediated event.

[0450] In an embodiment, the template nucleic acid can include sequence which results in an alteration in the coding sequence of a translated sequence, e.g., one which results in the substitution of one amino acid for another in a protein product, e.g., transforming a mutant allele into a wild type allele, transforming a wild type allele into a mutant allele, and/or introducing a stop codon, insertion of an amino acid residue, deletion of an amino acid residue, or a nonsense mutation.

[0451] In other embodiments, the template nucleic acid can include sequence which results in an alteration in a non-coding sequence, e.g., an alteration in an exon or in a 5′ or 3′ non-translated or non-transcribed region. Such alterations include an alteration in a control element, e.g., a promoter, enhancer, and an alteration in a cis-acting or trans-acting control element.

[0452] The template nucleic acid can include sequence which, when integrated, results in:

decreasing the activity of a positive control element;
increasing the activity of a positive control element;
decreasing the activity of a negative control element;
increasing the activity of a negative control element;
decreasing the expression of a gene;
increasing the expression of a gene;
increasing resistance to a disorder or disease;
increasing resistance to viral entry;
correcting a mutation or altering an unwanted amino acid residue;
conferring, increasing, abolishing or decreasing a biological property of a gene product, e.g., increasing the enzymatic activity of an enzyme, or increasing the ability of a gene product to interact with another molecule.

[0453] The template nucleic acid can include sequence which results in:

a change in sequence of 1, 2, 3, 4, 5, 6, 7, 8, 9, 10, 11, 12 or more nucleotides of the target sequence.

[0454] In an embodiment, the template nucleic acid is 20+/−10, 30+/−10, 40+/−10, 50+/−10, 60+/−10, 70+/−10, 80+/−10, 90+/−10, 100+/−10, 110+/−10, 120+/−10, 130+/−10, 140+/−10, 150+/−10, 160+/−10, 170+/−10, 180+/−10, 190+/−10, 200+/−10, 210+/−10, 220+/−10, 200-300, 300-400, 400-500, 500-600, 600-700, 700-800, 800-900, 900-1000, 1000-2000, 2000-3000 or more than 3000 nucleotides in length.

[0455] A template nucleic acid comprises the following components:

[5′ homology arm]-[insertion sequence]-[3′ homology arm].

[0456] The homology arms provide for recombination into the chromosome, which can replace the undesired element, e.g., a mutation or signature, with the replacement sequence. In an embodiment, the homology arms flank the most distal cleavage sites.

[0457] In an embodiment, the 3′ end of the 5′ homology arm is the position next to the 5′ end of the replacement sequence. In an embodiment, the 5′ homology arm can extend at least 10, 20, 30, 40, 50, 60, 70, 80, 90, 100, 120, 150, 180, 200, 300, 400, 500, 600, 700, 800, 900, 1000, 1500, or 2000 nucleotides 5′ from the 5′ end of the replacement sequence.

[0458] In an embodiment, the 5′ end of the 3′ homology arm is the position next to the 3′ end of the replacement sequence. In an embodiment, the 3′ homology arm can extend at least 10, 20, 30, 40, 50, 60, 70, 80, 90, 100, 120, 150, 180, 200, 300, 400, 500, 600, 700, 800, 900, 1000, 1500, or 2000 nucleotides 3′ from the 3′ end of the replacement sequence.

[0459] It is contemplated herein that one or both homology arms may be shortened to avoid including certain sequence repeat elements, e.g., Alu repeats, LINE elements. For example, a 5′ homology arm may be shortened to avoid a sequence repeat element. In other embodiments, a 3′ homology arm may be shortened to avoid a sequence repeat element. In some embodiments, both the 5′ and the 3′ homology arms may be shortened to avoid including certain sequence repeat elements.

[0460] It is contemplated herein that template nucleic acids for correcting a mutation may designed for use as a single-stranded oligonucleotide (ssODN). When using a ssODN, 5′ and 3′ homology arms may range up to about 200 base pairs (bp) in length, e.g., at least 25, 50, 75, 100, 125, 150, 175, or 200 bp in length. Longer homology arms are also contemplated for ssODNs as improvements in oligonucleotide synthesis continue to be made.

### NHEJ Approaches for Gene Targeting

[0461] As described herein, nuclease-induced non-homologous end-joining (NHEJ) can be used to target gene-specific knockouts. Nuclease-induced NHEJ can also be used to remove (e.g., delete) sequence in a gene of interest.

[0462] While not wishing to be bound by theory, it is believed that, in an embodiment, the genomic alterations associated with the methods described herein rely on nuclease-induced NHEJ and the error-prone nature of the NHEJ repair pathway. NHEJ repairs a double-strand break in the DNA by joining together the two ends; however, generally, the original sequence is restored only if two compatible ends, exactly as they were formed by the double-strand break, are perfectly ligated. The DNA ends of the double-strand break are frequently the subject of enzymatic processing, resulting in the addition or removal of nucleotides, at one or both strands, prior to rejoining of the ends. This results in the presence of insertion and/or deletion (indel) mutations in the DNA sequence at the site of the NHEJ repair. Two-thirds of these mutations may alter the reading frame and, therefore, produce a non-functional protein. Additionally, mutations that maintain the reading frame, but which insert or delete a significant amount of sequence, can destroy functionality of the protein. This is locus dependent as mutations in critical functional domains are likely less tolerable than mutations in non-critical regions of the protein.

[0463] The indel mutations generated by NHEJ are unpredictable in nature; however, at a given break site certain indel sequences are favored and are over represented in the population. The lengths of deletions can vary widely; most commonly in the 1-50 bp range, but they can easily reach greater than 100-200 bp. Insertions tend to be shorter and often include short duplications of the sequence immediately surrounding the break site. However, it is possible to obtain large insertions, and in these cases, the inserted sequence has often been traced to other regions of the genome or to plasmid DNA present in the cells.

[0464] Because NHEJ is a mutagenic process, it can also be used to delete small sequence motifs as long as the generation of a specific final sequence is not required. If a double-strand break is targeted near to a short target sequence, the deletion mutations caused by the NHEJ repair often span, and therefore remove, the unwanted nucleotides. For the deletion of larger DNA segments, introducing two double-strand breaks, one on each side of the sequence, can result in NHEJ between the ends with removal of the entire intervening sequence. Both of these approaches can be used to delete specific DNA sequences; however, the error-prone nature of NHEJ may still produce indel mutations at the site of repair.

[0465] Both double strand cleaving Cas9 molecules and single strand, or nickase, Cas9 molecules can be used in the methods and compositions described herein to generate NHEJ-mediated indels. NHEJ-mediated indels targeted to the gene, e.g., a coding region, e.g., an early coding region of a gene of interest can be used to knockout (i.e., eliminate expression of) a gene of interest. For example, early coding region of a gene of interest includes sequence immediately following a transcription start site, within a first exon of the coding sequence, or within 500 bp of the transcription start site (e.g., less than 500, 450, 400, 350, 300, 250, 200, 150, 100 or 50 bp).

### Placement of Double Strand or Single Strand Breaks Relative to the Target Position

[0466] In an embodiment, in which a gRNA and Cas9 nuclease generate a double strand break for the purpose of inducing NHEJ-mediated indels, a gRNA, e.g., a unimolecular (or chimeric) or modular gRNA molecule, is configured to position one double-strand break in close proximity to a nucleotide of the target position. In an embodiment, the cleavage site is between 0-500 bp away from the target position (e.g., less than 500, 400, 300, 200, 100, 50, 40, 30, 25, 20, 15, 10, 9, 8, 7, 6, 5, 4, 3, 2 or 1 bp from the target position).

[0467] In an embodiment, in which two gRNAs complexing with Cas9 nickases induce two single strand breaks for the purpose of inducing NHEJ-mediated indels, two gRNAs, e.g., independently, unimolecular (or chimeric) or modular gRNA, are configured to position two single-strand breaks to provide for NHEJ repair a nucleotide of the target position. In an embodiment, the gRNAs are configured to position cuts at the same position, or within a few nucleotides of one another, on different strands, essentially mimicking a double strand break. In an embodiment, the closer nick is between 0-30 bp away from the target position (e.g., less than 30, 25, 20, 1, 10, 9, 8, 7, 6, 5, 4, 3, 2 or 1 bp from the target position), and the two nicks are within 25-55 bp of each other (e.g., between 25 to 50, 25 to 45, 25 to 40, 25 to 35, 25 to 30, 50 to 55, 45 to 55, 40 to 55, 35 to 55, 30 to 55, 30 to 50, 35 to 50, 40 to 50, 45 to 50, 35 to 45, or 40 to 45 bp) and no more than 100 bp away from each other (e.g., no more than 90, 80, 70, 60, 50, 40, 30, 20 or 10 bp). In an embodiment, the gRNAs are configured to place a single strand break on either side of a nucleotide of the target position.

[0468] Both double strand cleaving Cas9 molecules and single strand, or nickase, Cas9 molecules can be used in the methods and compositions described herein to generate breaks both sides of a target position. Double strand or paired single strand breaks may be generated on both sides of a target position to remove the nucleic acid sequence between the two cuts (e.g., the region between the two breaks is deleted). In one embodiment, two gRNAs, e.g., independently, unimolecular (or chimeric) or modular gRNA, are configured to position a double-strand break on both sides of a target position (e.g., the first gRNA is used to target upstream (i.e., 5′) of the mutation in a gene or pathway described herein, and the second gRNA is used to target downstream (i.e., 3′) of the mutation in a gene or pathway described herein). In an alternate embodiment, three gRNAs, e.g., independently, unimolecular (or chimeric) or modular gRNA, are configured to position a double strand break (i.e., one gRNA complexes with a Cas9 nuclease) and two single strand breaks or paired single stranded breaks (i.e., two gRNAs complex with Cas9 nickases) on either side of a target position (e.g., the fu st gRNA is used to target upstream (i.e., 5′) of the mutation in a gene or pathway described herein, and the second gRNA is used to target downstream (i.e., 3′) of the mutation in a gene or pathway described herein). In another embodiment, four gRNAs, e.g., independently, unimolecular (or chimeric) or modular gRNA, are configured to generate two pairs of single stranded breaks (i.e., two pairs of two gRNAs complex with Cas9 nickases) on either side of the target position (e.g., the first gRNA is used to target upstream (i.e., 5′) of the mutation in a gene or pathway described herein, and the second gRNA is used to target downstream (i.e., 3′) of the mutation in a gene or pathway described herein). The double strand break(s) or the closer of the two single strand nicks in a pair will ideally be within 0-500 bp of the target position (e.g., no more than 450, 400, 350, 300, 250, 200, 150, 100, 50 or 25 bp from the target position). When nickases are used, the two nicks in a pair are within 25-55 bp of each other (e.g., between 25 to 50, 25 to 45, 25 to 40, 25 to 35, 25 to 30, 50 to 55, 45 to 55, 40 to 55, 35 to 55, 30 to 55, 30 to 50, 35 to 50, 40 to 50, 45 to 50, 35 to 45, or 40 to 45 bp) and no more than 100 bp away from each other (e.g., no more than 90, 80, 70, 60, 50, 40, 30, 20 or 10 bp).

[0469] In other embodiments, the insertion of template nucleic acid may be mediated by microhomology end joining (MMEJ). See, e.g., Saksuma et al., “MMEJ-assisted gene knock-in using TALENs and CRISPR-Cas9 with the PITCh systems.” Nature Protocols 11, 118-133 (2016) doi:10.1038/nprot.2015.140 Published online 17 Dec. 2015, the contents of which are incorporated by reference in their entirety.

### VIII. Systems Comprising More Than One gRNA Molecule

[0470] While not intending to be bound by theory, it has been surprisingly shown herein that the targeting of two target sequences (e.g., by two gRNA molecule/Cas9 molecule complexes which each induce a single- or double-strand break at or near their respective target sequences) located in close proximity on a continuous nucleic acid induces excision (e.g., deletion) of the nucleic acid sequence (or at least 80%, 85%, 90%, 95%, 96%, 97%, 98%, 99% of the nucleic acid sequence) located between the two target sequences. In some aspects, the present disclosure provides for the use of two or more gRNA molecules that comprise targeting domains targeting target sequences in close proximity on a continuous nucleic acid, e.g., a chromosome, e.g., a gene or gene locus, including its introns, exons and regulatory elements. The use may be, for example, by introduction of the two or more gRNA molecules, together with one or more Cas9 molecules (or nucleic acid encoding the two or more gRNA molecules and/or the one or more Cas9 molecules) into a cell.

[0471] In some aspects, the target sequences of the two or more gRNA molecules are located at least 5, 6, 7, 8, 9, 10, 20, 30, 40, 50, 60, 70, 80, 90, 100, 200, 300, 400, 500, 600, 700, 800, 900, 1000, 2000, 3000, 4000, 5000, 6000, 7000, 8000, 9000, 10,000, 11,000, 12,000, 13,000, 14,000, or 15,000 nucleotides apart on a continuous nucleic acid, but not more than 25,000 nucleotides apart on a continuous nucleic acid. In an embodiment, the target sequences are located about 4000 nucleotides apart. In an embodiment, the target sequences are located about 6000 nucleotides apart.

[0472] In some aspects, the plurality of gRNA molecules each target sequences within the same gene or gene locus. In another aspect, the plurality of gRNA molecules each target sequences within 2 or more different genes.

[0473] In some aspects, the invention provides compositions and cells comprising a plurality, for example, 2 or more, for example, 2, gRNA molecules of the invention, wherein the plurality of gRNA molecules target sequences less than 15,000, less than 14,000, less than 13,000, less than 12,000, less than 11,000, less than 10,000, less than 9,000, less than 8,000, less than 7,000, less than 6,000, less than 5,000, less than 4,000, less than 3,000, less than 2,000, less than 1,000, less than 900, less than 800, less than 700, less than 600, less than 500, less than 400, less than 300, less than 200, less than 100, less than 90, less than 80, less than 70, less than 60, less than 50, less than 40, or less than 30 nucleotides apart. In an embodiment, the target sequences are on the same strand of duplex nucleic acid. In an embodiment, the target sequences are on different strands of duplex nucleic acid.

[0474] In one embodiment, the invention provides a method for excising (e.g., deleting) nucleic acid disposed between two gRNA binding sites disposed less than 25,000, less than 20,000, less than 15,000, less than 14,000, less than 13,000, less than 12,000, less than 11,000, less than 10,000, less than 9,000, less than 8,000, less than 7,000, less than 6,000, less than 5,000, less than 4,000, less than 3,000, less than 2,000, less than 1,000, less than 900, less than 800, less than 700, less than 600, less than 500, less than 400, less than 300, less than 200, less than 100, less than 90, less than 80, less than 70, less than 60, less than 50, less than 40, or less than 30 nucleotides apart on the same or different strands of duplex nucleic acid. In an embodiment, the method provides for deletion of more than 50%, more than 60%, more than 70%, more than 80%, more than 85%, more than 86%, more than 87%, more than 88%, more than 89%, more than 90%, more than 91%, more than 92%, more than 93%, more than 94%, more than 95%, more than 96%, more than 97%, more than 98%, more than 99%, or 100% of the nucleotides disposed between the PAM sites associated with each gRNA binding site. In embodiments, the deletion further comprises of one or more nucleotides within one or more of the PAM sites associated with each gRNA binding site. In embodiments, the deletion also comprises one or more nucleotides outside of the region between the PAM sites associated with each gRNA binding site.

[0475] In one aspect, the two or more gRNA molecules comprise targeting domains targeting target sequences flanking a gene regulatory element, e.g., a promotor binding site, an enhancer region, or a repressor region, such that excision of the intervening sequence (or a portion of the intervening sequence) causes up- or down-regulation of a gene of interest.

[0476] In an embodiment, the two or more gRNA molecules include targeting domains comprising, e.g., consisting of, a targeting domain sequence of Table 1 or Table 5. In aspects, the two or more gRNA molecules comprise targeting domains that are complementary with sequences in the same gene. In aspects, the two or more gRNA molecules comprise targeting domains that are complementary with sequences of different genes. In an embodiment, the two or more gRNA molecules include targeting domains comprising, e.g., consisting of, a targeting domain sequence of Table 6. In an embodiment, the two or more gRNA molecules include targeting domains comprising, e.g., consisting of, a targeting domain sequence of Table 2, Table 7, Table 8 and/or Table 9. In aspects, the two or more gRNA molecules comprise targeting domains that are complementary with sequences in the same gene. In aspects, the two or more gRNA molecules comprise targeting domains that are complementary with sequences of different genes. In an embodiment, the two or more gRNA molecules are selected from the gRNA molecules of Table 7, Table 8 and/or Table 9. In an embodiment, the first and second gRNA molecules comprise targeting domains comprising, e.g., consisting of, targeting domain sequences selected from Tables 1-9, and are selected from different tables, e.g., and comprise targeting domains that are complementary with sequences of different genes.

[0477] In one aspect, the two or more gRNA molecules comprise targeting domains targeting target sequences flanking a gene regulatory element, e.g., a promotor binding site, an enhancer region, or a repressor region, such that excision of the intervening sequence (or a portion of the intervening sequence) causes up- or down-regulation of a gene of interest. By way of example, the two or more gRNA molecules comprise targeting domains targeting target sequences flanking a GATA1 binding site (or portion thereof) or TAL1 binding site (or portion thereof) of the erythroid enhancer region of the BCL11a gene (e.g., within the +55, +58 or +62 region). In other embodiments, the gRNA molecule or molecules do not result in a disruption of the GATA1 binding site or TAL1 binding site within the BCL11a Enhancer.

[0478] In an embodiment, the two or more gRNA molecules comprise targeting domains that comprise, e.g., consist of, targeting domains selected from Table 1. In an embodiment, the two or more gRNA molecules comprise targeting domains that comprise, e.g., consist of, targeting domains selected from Table 2. In an embodiment, the two or more gRNA molecules comprise targeting domains that comprise, e.g., consist of, targeting domains selected from Table 3. In an embodiment, the two or more gRNA molecules comprise targeting domains that comprise, e.g., consist of, targeting domains selected from Table 4. In an embodiment, the two or more gRNA molecules comprise targeting domains that comprise, e.g., consist of, targeting domains selected from Table 5. In an embodiment, the two or more gRNA molecules comprise targeting domains that comprise, e.g., consist of, targeting domains selected from Table 6. In an embodiment, the two or more gRNA molecules comprise targeting domains that comprise, e.g., consist of, targeting domains selected from Table 7. In an embodiment, the two or more gRNA molecules comprise targeting domains that comprise, e.g., consist of, targeting domains selected from Table 8. In an embodiment, the two or more gRNA molecules comprise targeting domains that comprise, e.g., consist of, targeting domains selected from Table 9.

[0479] In aspects, the two or more gRNA molecules comprise targeting domains comprising, e.g., consisting of the targeting domain sequence pairs listed in section II, above.

[0480] Without being bound by theory, it is believed that increasing the expression of fetal hemoglobin (e.g., gamma globin) while simultaneously reducing or eliminating expression of beta globin (e.g., beta globin comprising a sickling mutation), will result in increased efficacy in treating a hemoglobinopathy, e.g., sickle cell disease. Thus, in one aspect, the two or more gRNA molecules comprise a first gRNA molecule that causes an increase in gamma globin expression and a second gRNA molecule that reduces or eliminates expression of beta globin, e.g., beta globin carrying a sickle cell mutation. In embodiments, the two or more gRNA molecules comprise a first gRNA molecule that targets a sequence within a BCL11a enhancer region, e.g., as described herein, e.g., a gRNA molecule comprising a targeting domain comprising, e.g., consisting of, a targeting domain of Table 7, Table 8 or Table 9, and a second gRNA molecule that targets a sequence of a sickle globin gene (e.g., a beta globin gene comprising a sickling mutation).

### IX. Properties of the gRNA

[0481] It has further been surprisingly shown herein that gRNA molecules and CRISPR systems comprising said gRNA molecules produce similar or identical indel patterns across multiple experiments using the same cell type, method of delivery and crRNA/tracr components. Without being bound by theory, it is believed that some indel patterns may be more advantageous than others. For example, indels which predominantly include insertions and/or deletions which result in a “frameshift mutation” (e.g., 1- or 2-base pair insertion or deletions, or any insertion or deletion where n/3 is not a whole number (where n=the number of nucleotides in the insertion or deletion)) may be beneficial in reducing or eliminating expression of a functional protein. Likewise, indels which predominantly include “large deletions” (deletions of more than 10, 11, 12, 13, 14, 15, 20, 25, or 30 nucleotides) may also be beneficial in, for example, removing critical regulatory sequences such as promoter binding sites, which may similarly have an improved effect on expression of functional protein. While the indel patterns induced by a given gRNA/CRISPR system have surprisingly been found to be consistently reproduced across cell types, as described herein, not any single indel structure will inevitably be produced in a given cell upon introduction of a gRNA/CRISPR system.

[0482] The invention thus provides for gRNA molecules which create a beneficial indel pattern or structure, for example, which have indel patterns or structures predominantly composed of frameshift mutation(s) and/or large deletions. Such gRNA molecules may be selected by assessing the indel pattern or structure created by a candidate gRNA molecule in a test cell (for example, a HEK293 cell) or in the cell of interest, e.g., a HSPC cell by NGS, as described herein. As shown in the Examples, gRNA molecules have been discovered, which, when introduced into the desired cell population, result in a population of cells comprising a significant fraction of the cells having a frameshift mutation in the targeted gene. In some cases, the rate of frameshift mutation is as high as 75%, 80%, 85%, 90% or more. The invention thus provides for populations of cells which comprise at least about 40% of cells (e.g., at least about 45%, at least about 50%, at least about 55%, at least about 60%, at least about 65%, at least about 70%, at least about 75%, at least about 80%, at least about 85%, at least about 90%, at least about 95%, or at least about 99%) having a frameshift mutation, e.g., as described herein, at or near the target site of a gRNA moleucle described herein. The invention also provides for populations of cells which comprise at least about 50% of cells (e.g., at least about 55%, at least about 60%, at least about 65%, at least about 70%, at least about 75%, at least about 80%, at least about 85%, at least about 90%, at least about 95%, or at least about 99%) having a frameshift mutation, e.g., as described herein, at or near the target site of a gRNA moleucle described herein.

[0483] The invention thus provides methods of selecting gRNA molecules for use in the therapeutic methods of the invention comprising: 1) providing a plurality of gRNA molecules to a target of interest, 2) assessing the indel pattern or structure created by use of said gRNA molecules, 3) selecting a gRNA molecule that forms an indel pattern or structure composed predominantly of frameshift mutations, large deletions or a combination thereof, and 4) using said selected gRNA in a methods of the invention.

[0484] The invention further provides methods of altering cells, and altered cells, wherein a particular indel pattern is consistently produced with a given gRNA/CRISPR system in that cell type. The indel patterns, including the top 5 most frequently occurring indels observed with the gRNA/CRISPR systems described herein are disclosed, for example, in the Examples. As shown in the examples, populations of cells are generated, wherein a significant fraction of the cells comprises one of the top 5 indels (for example, populations of cells wherein one of the top 5 indels is present in more than 30%, more than 40%, more than 50%, more than 60% or more of the cells of the population. Thus, the invention provides cells, e.g., HSPCs (as described herein), which comprise an indel of any one of the top 5 indels observed with a given gRNA/CRISPR system. Further, the invention provides populations of cells, e.g., HSPCs (as described herein), which when assessed by, for example, NGS, comprise a high percentage of cells comprising one of the top 5 indels described herein for a given gRNA/CRISPR system. When used in connection with indel pattern analysis, a “high percentage” refers to at least about 50% (e.g., at least about 55%, at least about 60%, at least about 65%, at least about 70%, at least about 75%, at least about 80%, at least about 85%, at least about 90%, at least about 95%, or at least about 99%) of the cells of the population comprising one of the top 5 indels described herein for a given gRNA/CRISPR system. In other embodiments, the population of cells comprises at least about 25% (e.g., from about 25% to about 60%, e.g., from about 25% to about 50%, e.g., from about 25% to about 40%, e.g., from about 25% to about 35%) of cells which have one of the top 5 indels described herein for a given gRNA/CRISPR system. In embodiments, the top indels, e.g., top 5 indels for a given gRNA/CRISPR system which targets a +58 region of the BCL11a enhancer are provided in Table 15, FIG. 25, and Table 37. In embodiments, the top indels, e.g., top 5 indels for a given gRNA/CRISPR system which targets a HPFH region are provided in Table 26, Table 27 and Table 37.

[0485] It has also been discovered that certain gRNA molecules do not create indels at off-target sequences within the genome of the target cell type, or produce indels at off target sites at very low frequencies (e.g., <5% of cells within a population) relative to the frequency of indel creation at the target site. Thus, the invention provides for gRNA molecules and CRISPR systems which do not exhibit off-target indel formation in the target cell type, or which produce a frequency of off-target indel formation of <5%. In embodiments, the invention provides gRNA molecules and CRISPR systems which do not exhibit any off target indel formation in the target cell type. Thus, the invention further provides a cell, e.g., a population of cells, e.g., HSPCs, e.g., as described herein, which comprise an indel at or near a target site of a gRNA molecule described herein (e.g., a frameshift indel, or any one of the top 5 indels produced by a given gRNA/CRISPR system, e.g., as described herein), but does not comprise an indel at any off-target site of the gRNA molecule. In other embodiments, the invention further provides a a population of cells, e.g., HSPCs, e.g., as described herein, which comprises >50% of cells which have an indel at or near a target site of a gRNA molecule described herein (e.g., a frameshift indel, or any one of the top 5 indels produced by a given gRNA/CRISPR system, e.g., as described herein), but which comprises less than 5%, e.g., less than 4%, less than 3%, less than 2% or less than 1%, of cells comprising an indel at any off-target site of the gRNA molecule.

[0486] In embodiments, the indel produced by a CRISPR system described herein (e.g., a CRISPR system comprising a gRNA molecule described herein), does not comprise a nucleotide of a GATA-1 binding site and/or does not comprise a nucleotide of a TAL-1 binding site (e.g., does not comprise a nucleotide of a GATA-1 binding site and/or TAL-1 binding site described in FIG. 25).

### X. Delivery/Constructs

[0487] The components, e.g., a Cas9 molecule or gRNA molecule, or both, can be delivered, formulated, or administered in a variety of forms. As a non-limiting example, the gRNA molecule and Cas9 molecule can be formulated (in one or more compositions), directly delivered or administered to a cell in which a genome editing event is desired. Alternatively, nucleic acid encoding one or more components, e.g., a Cas9 molecule or gRNA molecule, or both, can be formulated (in one or more compositions), delivered or administered. In one aspect, the gRNA molecule is provided as DNA encoding the gRNA molecule and the Cas9 molecule is provided as DNA encoding the Cas9 molecule. In one embodiment, the gRNA molecule and Cas9 molecule are encoded on separate nucleic acid molecules. In one embodiment, the gRNA molecule and Cas9 molecule are encoded on the same nucleic acid molecule. In one aspect, the gRNA molecule is provided as RNA and the Cas9 molecule is provided as DNA encoding the Cas9 molecule. In one embodiment, the gRNA molecule is provided with one or more modifications, e.g., as described herein. In one aspect, the gRNA molecule is provided as RNA and the Cas9 molecule is provided as mRNA encoding the Cas9 molecule. In one aspect, the gRNA molecule is provided as RNA and the Cas9 molecule is provided as a protein. In one embodiment, the gRNA and Cas9 molecule are provided as a ribonuclear protein complex (RNP). In one aspect, the gRNA molecule is provided as DNA encoding the gRNA molecule and the Cas9 molecule is provided as a protein.

[0488] Delivery, e.g., delivery of the RNP, (e.g., to HSPC cells as described herein) may be accomplished by, for example, electroporation (e.g., as known in the art) or other method that renders the cell membrane permeable to nucleic acid and/or polypeptide molecules. In embodiments, the CRISPR system, e.g., the RNP as described herein, is delivered by electroporation using a 4D-Nucleofector (Lonza), for example, using program CM-137 on the 4D-Nucleofector (Lonza). In embodiments, the CRISPR system, e.g., the RNP as described herein, is delivered by electroporation using a voltage from about 800 volts to about 2000 volts, e.g., from about 1000 volts to about 1800 volts, e.g., from about 1200 volts to about 1800 volts, e.g., from about 1400 volts to about 1800 volts, e.g., from about 1600 volts to about 1800 volts, e.g., about 1700 volts, e.g., at a voltage of 1700 volts. In embodiments, the pulse width/length is from about 10 ms to about 50 ms, e.g., from about 10 ms to about 40 ms, e.g., from about 10 ms to about 30 ms, e.g., from about 15 ms to about 25 ms, e.g., about 20 ms, e.g., 20 ms. In embodiments, 1, 2, 3, 4, 5, or more, e.g., 2, e.g., 1 pulses are used. In an embodiment, the CRISPR system, e.g., the RNP as described herein, is delivered by electroporation using a voltage of about 1700 volts (e.g., 1700 volts), a pulse width of about 20 ms (e.g., 20 ms), using a single (1) pulse. In embodiments, electroporation is accomplished using a Neon electroporator. Additional techniques for rendering the membrane permeable are known in the art and include, for example, cell squeezing (e.g., as described in WO2015/023982 and WO2013/059343, the contents of which are hereby incorporated by reference in their entirety), nanoneedles (e.g., as described in Chiappini et al., Nat. Mat., 14; 532-39, or US2014/0295558, the contents of which are hereby incorporated by reference in their entirety) and nanostraws (e.g., as described in Xie, ACS Nano, 7(5); 4351-58, the contents of which are hereby incorporated by reference in their entirety).

[0489] When a component is delivered encoded in DNA the DNA will typically include a control region, e.g., comprising a promoter, to effect expression. Useful promoters for Cas9 molecule sequences include CMV, EF-1alpha, MSCV, PGK, CAG control promoters. Useful promoters for gRNAs include H1, EF-1a and U6 promoters. Promoters with similar or dissimilar strengths can be selected to tune the expression of components. Sequences encoding a Cas9 molecule can comprise a nuclear localization signal (NLS), e.g., an SV40 NLS. In an embodiment, a promoter for a Cas9 molecule or a gRNA molecule can be, independently, inducible, tissue specific, or cell specific.

DNA-Based Delivery of a Cas9 Molecule and or a gRNA Molecule

[0490] DNA encoding Cas9 molecules and/or gRNA molecules, can be administered to subjects or delivered into cells by art-known methods or as described herein. For example, Cas9-encoding and/or gRNA-encoding DNA can be delivered, e.g., by vectors (e.g., viral or non-viral vectors), non-vector based methods (e.g., using naked DNA or DNA complexes), or a combination thereof.

[0491] In some embodiments, the Cas9- and/or gRNA-encoding DNA is delivered by a vector (e.g., viral vector/virus, plasmid, minicircle or nanoplasmid).

[0492] A vector can comprise a sequence that encodes a Cas9 molecule and/or a gRNA molecule. A vector can also comprise a sequence encoding a signal peptide (e.g., for nuclear localization, nucleolar localization, mitochondrial localization), fused, e.g., to a Cas9 molecule sequence. For example, a vector can comprise one or more nuclear localization sequence (e.g., from SV40) fused to the sequence encoding the Cas9 molecule.

[0493] One or more regulatory/control elements, e.g., a promoter, an enhancer, an intron, a polyadenylation signal, a Kozak consensus sequence, internal ribosome entry sites (IRES), a 2A sequence, and a splice acceptor or donor can be included in the vectors. In some embodiments, the promoter is recognized by RNA polymerase II (e.g., a CMV promoter). In other embodiments, the promoter is recognized by RNA polymerase III (e.g., a U6 promoter). In some embodiments, the promoter is a regulated promoter (e.g., inducible promoter). In other embodiments, the promoter is a constitutive promoter. In some embodiments, the promoter is a tissue specific promoter. In some embodiments, the promoter is a viral promoter. In other embodiments, the promoter is a non-viral promoter.

[0494] In some embodiments, the vector or delivery vehicle is a minicircle. In some embodiments, the vector or delivery vehicle is a nanoplasmid.

[0495] In some embodiments, the vector or delivery vehicle is a viral vector (e.g., for generation of recombinant viruses). In some embodiments, the virus is a DNA virus (e.g., dsDNA or ssDNA virus). In other embodiments, the virus is an RNA virus (e.g., an ssRNA virus).

[0496] Exemplary viral vectors/viruses include, e.g., retroviruses, lentiviruses, adenovirus, adeno-associated virus (AAV), vaccinia viruses, poxviruses, and herpes simplex viruses. Viral vector technology is well known in the art and is described, for example, in Sambrook et al., 2012, MOLECULAR CLONING: A LABORATORY MANUAL, volumes 1-4, Cold Spring Harbor Press, NY), and in other virology and molecular biology manuals.

[0497] In some embodiments, the virus infects dividing cells. In other embodiments, the virus infects non-dividing cells. In some embodiments, the virus infects both dividing and non-dividing cells. In some embodiments, the virus can integrate into the host genome. In some embodiments, the virus is engineered to have reduced immunity, e.g., in human. In some embodiments, the virus is replication-competent. In other embodiments, the virus is replication-defective, e.g., having one or more coding regions for the genes necessary for additional rounds of virion replication and/or packaging replaced with other genes or deleted. In some embodiments, the virus causes transient expression of the Cas9 molecule and/or the gRNA molecule. In other embodiments, the virus causes long-lasting, e.g., at least 1 week, 2 weeks, 1 month, 2 months, 3 months, 6 months, 9 months, 1 year, 2 years, or permanent expression, of the Cas9 molecule and/or the gRNA molecule. The packaging capacity of the viruses may vary, e.g., from at least about 4 kb to at least about 30 kb, e.g., at least about 5 kb, 10 kb, 15 kb, 20 kb, 25 kb, 30 kb, 35 kb, 40 kb, 45 kb, or 50 kb.

[0498] In some embodiments, the Cas9- and/or gRNA-encoding DNA is delivered by a recombinant retrovirus. In some embodiments, the retrovirus (e.g., Moloney murine leukemia virus) comprises a reverse transcriptase, e.g., that allows integration into the host genome. In some embodiments, the retrovirus is replication-competent. In other embodiments, the retrovirus is replication-defective, e.g., having one of more coding regions for the genes necessary for additional rounds of virion replication and packaging replaced with other genes, or deleted.

[0499] In some embodiments, the Cas9- and/or gRNA-encoding DNA is delivered by a recombinant lentivirus. For example, the lentivirus is replication-defective, e.g., does not comprise one or more genes required for viral replication.

[0500] In some embodiments, the Cas9- and/or gRNA-encoding DNA is delivered by a recombinant adenovirus. In some embodiments, the adenovirus is engineered to have reduced immunity in human.

[0501] In some embodiments, the Cas9- and/or gRNA-encoding DNA is delivered by a recombinant AAV. In some embodiments, the AAV can incorporate its genome into that of a host cell, e.g., a target cell as described herein. In some embodiments, the AAV is a self-complementary adeno-associated virus (scAAV), e.g., a scAAV that packages both strands which anneal together to form double stranded DNA. AAV serotypes that may be used in the disclosed methods include, e.g., AAV 1, AAV2, modified AAV2 (e.g., modifications at Y444F, Y500F, Y730F and/or S662V), AAV3, modified AAV3 (e.g., modifications at Y705F, Y731F and/or. T492V), AAV4, AAVS, AAV6, modified AAV6 (e.g., modifications at S663V and/or T492V), AAV8. AAV 8.2, AAV9, AAV rh 10, and pseudotyped AAV, such as AAV2/8, AAV2/5 and AAV2/6 can also be used in the disclosed methods.

[0502] In some embodiments, the Cas9- and/or gRNA-encoding DNA is delivered by a hybrid virus, e.g., a hybrid of one or more of the viruses described herein.

[0503] A Packaging cell is used to form a virus particle that is capable of infecting a host or target cell. Such a cell includes a 293 cell, which can package adenovirus, and a w2 cell or a PA317 cell, which can package retrovirus. A viral vector used in gene therapy is usually generated by a producer cell line that packages a nucleic acid vector into a viral particle. The vector typically contains the minimal viral sequences required for packaging and subsequent integration into a host or target cell (if applicable), with other viral sequences being replaced by an expression cassette encoding the protein to be expressed. For example, an AAV vector used in gene therapy typically only possesses inverted terminal repeat (ITR) sequences from the AAV genome which are required for packaging and gene expression in the host or target cell. The missing viral functions are supplied in trans by the packaging cell line. Henceforth, the viral DNA is packaged in a cell line, which contains a helper plasmid encoding the other AAV genes, namely rep and cap, but lacking ITR sequences. The cell line is also infected with adenovirus as a helper. The helper virus promotes replication of the AAV vector and expression of AAV genes from the helper plasmid. The helper plasmid is not packaged in significant amounts due to a lack of ITR sequences. Contamination with adenovirus can be reduced by, e.g., heat treatment to which adenovirus is more sensitive than AAV.

[0504] In an embodiment, the viral vector has the ability of cell type and/or tissue type recognition. For example, the viral vector can be pseudotyped with a different/alternative viral envelope glycoprotein; engineered with a cell type-specific receptor (e.g., genetic modification of the viral envelope glycoproteins to incorporate targeting ligands such as a peptide ligand, a single chain antibody, a growth factor); and/or engineered to have a molecular bridge with dual specificities with one end recognizing a viral glycoprotein and the other end recognizing a moiety of the target cell surface (e.g., ligand-receptor, monoclonal antibody, avidin-biotin and chemical conjugation).

[0505] In an embodiment, the viral vector achieves cell type specific expression. For example, a tissue-specific promoter can be constructed to restrict expression of the transgene (Cas 9 and gRNA) in only the target cell. The specificity of the vector can also be mediated by microRNA-dependent control of transgene expression. In an embodiment, the viral vector has increased efficiency of fusion of the viral vector and a target cell membrane. For example, a fusion protein such as fusion-competent hemagglutin (HA) can be incorporated to increase viral uptake into cells. In an embodiment, the viral vector has the ability of nuclear localization. For example, a virus that requires the breakdown of the cell wall (during cell division) and therefore will not infect a non-diving cell can be altered to incorporate a nuclear localization peptide in the matrix protein of the virus thereby enabling the transduction of non-proliferating cells.

[0506] In some embodiments, the Cas9- and/or gRNA-encoding DNA is delivered by a non-vector based method (e.g., using naked DNA or DNA complexes). For example, the DNA can be delivered, e.g., by organically modified silica or silicate (Ormosil), electroporation, gene gun, sonoporation, magnetofection, lipid-mediated transfection, dendrimers, inorganic nanoparticles, calcium phosphates, or a combination thereof.

[0507] In some embodiments, the Cas9- and/or gRNA-encoding DNA is delivered by a combination of a vector and a non-vector based method. For example, a virosome comprises a liposome combined with an inactivated virus (e.g., HIV or influenza virus), which can result in more efficient gene transfer, e.g., in a respiratory epithelial cell than either a viral or a liposomal method alone.

[0508] In an embodiment, the delivery vehicle is a non-viral vector. In an embodiment, the non-viral vector is an inorganic nanoparticle (e.g., attached to the payload to the surface of the nanoparticle).

[0509] Exemplary inorganic nanoparticles include, e.g., magnetic nanoparticles (e.g., Fe lvln0₂), or silica. The outer surface of the nanoparticle can be conjugated with a positively charged polymer (e.g., polyethylenimine, polylysine, polyserine) which allows for attachment (e.g., conjugation or entrapment) of payload. In an embodiment, the non-viral vector is an organic nanoparticle (e.g., entrapment of the payload inside the nanoparticle). Exemplary organic nanoparticles include, e.g., SNALP liposomes that contain cationic lipids together with neutral helper lipids which are coated with polyethylene glycol (PEG) and protamine and nucleic acid complex coated with lipid coating.

[0510] Exemplary lipids and/or polymers for for transfer of CRISPR systems or nucleic acid, e.g., vectors, encoding CRISPR systems or components thereof include, for example, those described in WO2011/076807, WO2014/136086, WO2005/060697, WO2014/140211, WO2012/031046, WO2013/103467, WO2013/006825, WO2012/006378, WO2015/095340, and WO2015/095346, the contents of each of the foregoing are hereby incorporated by reference in their entirety. In an embodiment, the vehicle has targeting modifications to increase target cell update of nanoparticles and liposomes, e.g., cell specific antigens, monoclonal antibodies, single chain antibodies, aptamers, polymers, sugars, and cell penetrating peptides. In an embodiment, the vehicle uses fusogenic and endosome-destabilizing peptides/polymers. In an embodiment, the vehicle undergoes acid-triggered conformational changes (e.g., to accelerate endosomal escape of the cargo). In an embodiment, a stimuli-cleavable polymer is used, e.g., for release in a cellular compartment. For example, disulfide-based cationic polymers that are cleaved in the reducing cellular environment can be used.

[0511] In an embodiment, the delivery vehicle is a biological non-viral delivery vehicle. In an embodiment, the vehicle is an attenuated bacterium (e.g., naturally or artificially engineered to be invasive but attenuated to prevent pathogenesis and expressing the transgene (e.g., Listeria monocytogenes, certain Salmonella strains, Bifidobacterium longum, and modified Escherichia coli), bacteria having nutritional and tissue-specific tropism to target specific tissues, bacteria having modified surface proteins to alter target tissue specificity). In an embodiment, the vehicle is a genetically modified bacteriophage (e.g., engineered phages having large packaging capacity, less immunogenic, containing mammalian plasmid maintenance sequences and having incorporated targeting ligands) In an embodiment, the vehicle is a mammalian virus-like particle. For example, modified viral particles can be generated (e.g., by purification of the “empty” particles followed by ex vivo assembly of the virus with the desired cargo). The vehicle can also be engineered to incorporate targeting ligands to alter target tissue specificity. In an embodiment, the vehicle is a biological liposome. For example, the biological liposome is a phospholipid-based particle derived from human cells (e.g., erythrocyte ghosts, which are red blood cells broken down into spherical structures derived from the subject (e.g., tissue targeting can be achieved by attachment of various tissue or cell-specific ligands), or secretory exosomes—subject (i.e., patient) derived membrane-bound nanovescicle (30-100 nm) of endocytic origin (e.g., can be produced from various cell types and can therefore be taken up by cells without the need of for targeting ligands).

[0512] In an embodiment, one or more nucleic acid molecules (e.g., DNA molecules) other than the components of a Cas system, e.g., the Cas9 molecule component and/or the gRNA molecule component described herein, are delivered. In an embodiment, the nucleic acid molecule is delivered at the same time as one or more of the components of the Cas system are delivered. In an embodiment, the nucleic acid molecule is delivered before or after (e.g., less than about 30 minutes, 1 hour, 2 hours, 3 hours, 6 hours, 9 hours, 12 hours, 1 day, 2 days, 3 days, 1 week, 2 weeks, or 4 weeks) one or more of the components of the Cas9 system are delivered. In an embodiment, the nucleic acid molecule is delivered by a different means than one or more of the components of the Cas9 system, e.g., the Cas9 molecule component and/or the gRNA molecule component, are delivered. The nucleic acid molecule can be delivered by any of the delivery methods described herein. For example, the nucleic acid molecule can be delivered by a viral vector, e.g., an integration-deficient lentivirus, and the Cas9 molecule component and/or the gRNA molecule component can be delivered by electroporation, e.g., such that the toxicity caused by nucleic acids (e.g., DNAs) can be reduced. In an embodiment, the nucleic acid molecule encodes a therapeutic protein, e.g., a protein described herein. In an embodiment, the nucleic acid molecule encodes an RNA molecule, e.g., an RNA molecule described herein. Delivery of RNA encoding a Cas9 molecule

[0513] RNA encoding Cas9 molecules (e.g., active Cas9 molecules, inactive Cas9 molecules or inactive Cas9 fusion proteins) and/or gRNA molecules, can be delivered into cells, e.g., target cells described herein, by art-known methods or as described herein. For example, Cas9-encoding and/or gRNA-encoding RNA can be delivered, e.g., by microinjection, electroporation, lipid-mediated transfection, peptide-mediated delivery, or a combination thereof.

### Delivery of Cas9 Molecule as Protein

[0514] Cas9 molecules (e.g., active Cas9 molecules, inactive Cas9 molecules or inactive Cas9 fusion proteins) can be delivered into cells by art-known methods or as described herein. For example, Cas9 protein molecules can be delivered, e.g., by microinjection, electroporation, lipid-mediated transfection, peptide-mediated delivery, cell squeezing or abrasion (e.g., by nanoneedles) or a combination thereof. Delivery can be accompanied by DNA encoding a gRNA or by a gRNA, e.g., by precomplexing the gRNA and the Cas9 protein in a ribonuclear protein complex (RNP).

[0515] In an aspect the Cas9 molecule, e.g., as described herein, is delivered as a protein and the gRNA molecule is delivered as one or more RNAs (e.g., as a dgRNA or sgRNA, as described herein). In embodiments, the Cas9 protein is complexed with the gRNA molecule prior to delivery to a cell, e.g., as described herein, as a ribonuclear protein complex (“RNP”). In embodiments, the RNP can be delivered into cells, e.g., described herein, by any art-known method, e.g., electroporation. As described herein, and without being bound by theory, it can be preferable to use a gRNA moleucle and Cas9 molecule which result in high % editing at the target sequence (e.g., >85%, >90%, >95%, >98%, or >99%) in the target cell, e.g., described herein, even when the concentration of RNP delivered to the cell is reduced. Again, without being bound by theory, delivering a reduced or low concentration of RNP comprising a gRNA moleucle that produces a high % editing at the target sequence in the target cell (including at the low RNP concentration), can be beneficial because it may reduce the frequency and number of off-target editing events. In one aspect, where a low or reduced concentration of RNP is to be used, the following exemplary procedure can be used to generate the RNP with a dgRNA molecule:
[0516] 1. Provide the Cas9 molecule and the tracr in solution at a high concentration (e.g., a concentration higher than the final RNP concentration to be delivered to the cell), and allow the two components to equilibrate;
[0517] 2. Provide the crRNA molecule, and allow the components to equilibrate (thereby forming a high-concentration solution of the RNP);
[0518] 3. Dilute the RNP solution to the desired concentration;
[0519] 4. Deliver said RNP at said desired concentration to the target cells, e.g., by electroporation.

[0520] The above procedure may be modified for use with sgRNA molecules by omitting step 2, above, and in step 1, providing the Cas9 molecule and the sgRNA molecule in solution at high concentraiton, and allowing the components to equilibrate. In embodiments, the Cas9 moleucle and each gRNA component are provided in solution at a 1:2 ratio (Cas9:gRNA), e.g., a 1:2 molar ratio of Cas9:gRNA molecule. Where dgRNA molecules are used, the ratio, e.g., molar rato, is 1:2:2 (Cas9:tracr:crRNA). In embodiments, the RNP is formed at a concentration of 20 uM or higher, e.g., a concentration from about 20 uM to about 50 uM. In embodiments, the RNP is formed at a concentration of 10 uM or higher, e.g., a concentration from about 10 uM to about 30 uM. In embodiments, the RNP is diluted to a final concentration of 10 uM or less (e.g., a concentration from about 0.01 uM to about 10 uM) in a solution comprising the target cell (e.g., described herein) for delivery to said target cell. In embodiments, the RNP is diluted to a final concentration of 3 uM or less (e.g., a concentration from about 0.01 uM to about 3 uM) in a solution comprising the target cell (e.g., described herein) for delivery to said target cell. In embodiments, the RNP is diluted to a final concentration of 1 uM or less (e.g., a concentration from about 0.01 uM to about 1 uM) in a solution comprising the target cell (e.g., described herein) for delivery to said target cell. In embodiments, the RNP is diluted to a final concentration of 0.3 uM or less (e.g., a concentration from about 0.01 uM to about 0.3 uM) in a solution comprising the target cell (e.g., described herein) for delivery to said target cell. In embodiments, the RNP is provided at a final concentration of about 3 uM in a solution comprising the target cell (e.g., described herein) for delivery to said target cell. In embodiments, the RNP is provided at a final concentration of about 1 uM in a solution comprising the target cell (e.g., described herein) for delivery to said target cell. In embodiments, the RNP is provided at a final concentration of about 0.3 uM in a solution comprising the target cell (e.g., described herein) for delivery to said target cell. In embodiments, the RNP is provided at a final concentration of about 0.1 uM in a solution comprising the target cell (e.g., described herein) for delivery to said target cell. In embodiments, the RNP is provided at a final concentration of about 0.05 uM in a solution comprising the target cell (e.g., described herein) for delivery to said target cell. In embodiments, the RNP is provided at a final concentration of about 0.03 uM in a solution comprising the target cell (e.g., described herein) for delivery to said target cell. In embodiments, the RNP is provided at a final concentration of about 0.01 uM in a solution comprising the target cell (e.g., described herein) for delivery to said target cell. In embodiments, the RNP is formulated in a medium suitable for electroporation. In embodiments, the RNP is delivered to cells, e.g., HSPC cells, e.g., as described herein, by electroporation, e.g., using electroporation conditions described herein.

### Bi-Modal or Differential Delivery of Components

[0521] Separate delivery of the components of a Cas system, e.g., the Cas9 molecule component and the gRNA molecule component, and more particularly, delivery of the components by differing modes, can enhance performance, e.g., by improving tissue specificity and safety.

[0522] In an embodiment, the Cas9 molecule and the gRNA molecule are delivered by different modes, or as sometimes referred to herein as differential modes. Different or differential modes, as used herein, refer modes of delivery that confer different pharmacodynamic or pharmacokinetic properties on the subject component molecule, e.g., a Cas9 molecule, gRNA molecule, or template nucleic acid. For example, the modes of delivery can result in different tissue distribution, different half-life, or different temporal distribution, e.g., in a selected compartment, tissue, or organ.

[0523] Some modes of delivery, e.g., delivery by a nucleic acid vector that persists in a cell, or in progeny of a cell, e.g., by autonomous replication or insertion into cellular nucleic acid, result-in more persistent expression of and presence of a component.

### XI. Methods of Treatment

[0524] The Cas9 systems, e.g., one or more gRNA molecules and one or more Cas9 molecules, described herein are useful for the treatment of disease in a mammal, e.g., in a human. The terms “treat,” “treated,” “treating,” and “treatment,” include the administration of cas9 systems, e.g., one or more gRNA molecules and one or more cas9 molecules, to cells to prevent or delay the onset of the symptoms, complications, or biochemical indicia of a disease, alleviating the symptoms or arresting or inhibiting further development of the disease, condition, or disorder. Treatment may also include the administration of one or more (e.g., a population of) cells, e.g., HSPCs, that have been modified by the introduction of a gRNA molecule (or more than one gRNA molecule) of the present invention, or by the introduction of a CRISPR system as described herein, or by any of the methods of preparing said cells described herein, to prevent or delay the onset of the symptoms, complications, or biochemical indicia of a disease, alleviating the symptoms or arresting or inhibiting further development of the disease, condition, or disorder. Treatment may be prophylactic (to prevent or delay the onset of the disease, or to prevent the manifestation of clinical or subclinical symptoms thereof) or therapeutic suppression or alleviation of symptoms after the manifestation of the disease. Treatment can be measured by the therapeutic measures described hererin. Thus, the methods of “treatment” of the present invention also include administration of cells altered by the introduction of a cas9 system (e.g., one or more gRNA molecules and one or more Cas9 molecules) into said cells to a subject in order to cure, reduce the severity of, or ameliorate one or more symptoms of a disease or condition, in order to prolong the health or survival of a subject beyond that expected in the absence of such treatment. For example, “treatment” includes the alleviation of a disease symptom in a subject by at least 5%, 6%, 7%, 8%, 9%, 10%, 11%, 12%, 13%, 14%, 15%, 16%, 17%, 18%, 19%, 20%, 25%, 30%, 35%, 40%, 45%, 50%, 55%, 60%, 65%, 70%, 75%, 80%, 85%, 90%, 95% or more.

[0525] Cas9 systems comprising gRNA molecules comprising the targeting domains described herein, e.g., in Tables 1, 2, 3, 4, 5, 6, 7, 8, and/or 9, are useful for the treatment of hemoglobinopathies.

### Hemoglobinopathies

[0526] Hemoglobinopathies encompass a number of anemias of genetic origin in which there is a decreased production and/or increased destruction (hemolysis) of red blood cells (RBCs). These also include genetic defects that result in the production of abnormal hemoglobins with a concomitant impaired ability to maintain oxygen concentration. Some such disorders involve the failure to produce normal β-globin in sufficient amounts, while others involve the failure to produce normal β-globin entirely. These disorders associated with the β-globin protein are referred to generally as β-hemoglobinopathies. For example, β-thalassemias result from a partial or complete defect in the expression of the β-globin gene, leading to deficient or absent HbA. Sickle cell anemia results from a point mutation in the β-globin structural gene, leading to the production of an abnormal (sickle) hemoglobin (HbS). HbS is prone to polymerization, particularly under deoxygenated conditions. HbS RBCs are more fragile than normal RBCs and undergo hemolysis more readily, leading eventually to anemia.

[0527] In an embodiment, a genetic defect in alpha globin or beta globin is corrected, e.g., by homologous recombination, using the Cas9 molecules and gRNA molecules, e.g., CRISPR systems, described herein.

[0528] In an embodiment, a gene encoding a wild type (e.g., non-mutated) copy of alpha globin or beta globin is inserted into the genome of the cell, e.g., at a safe harbor site, e.g., at an AAVS1 safe harbor site, by homologous recombination, using a CRISPR system and methods described herein.

[0529] In an embodiment, a hemoglobinopathies-associated gene is targeted, using the Cas9 molecule and gRNA molecule described herein. Exemplary targets include, e.g., genes associated with control of the gamma-globin genes. In an embodiment, the target is BCL11A. In an embodiment, the target is a BCL11a enhancer. In an embodiment, the target is a HPFH region.

[0530] Fetal hemoglobin (also hemoglobin F or HbF or α2γ2) is a tetramer of two adult alpha-globin polypeptides and two fetal beta-like gamma-globin polypeptides. HbF is the main oxygen transport protein in the human fetus during the last seven months of development in the uterus and in the newborn until roughly 6 months old. Functionally, fetal hemoglobin differs most from adult hemoglobin in that it is able to bind oxygen with greater affinity than the adult form, giving the developing fetus better access to oxygen from the mother's bloodstream.

[0531] In newborns, fetal hemoglobin is nearly completely replaced by adult hemoglobin by approximately 6 months postnatally. In adults, fetal hemoglobin production can be reactivated pharmacologically, which is useful in the treatment of diseases such as hemoglobinopathies. For example, in certain patients with hemoglobinopathies, higher levels of gamma-globin expression can partially compensate for defective or impaired beta-globin gene production, which can ameliorate the clinical severity in these diseases. Increased HbF levels or F-cell (HbF containing erythrocyte) numbers can ameliorate the disease severity of hemoglobinopathies, e.g., beta-thalassemia major and sickle cell anemia.

[0532] Increased HbF levels or F-cell can be associated reduced BCL11A expression in cells. The BCL11A gene encodes a multi-zinc finger transcription factor. In an embodiment, the expression of BCL11A is modulated, e.g., down-regulated. In an embodiment, the BCL11A gene is edited. In an embodiment, the function of BCL11a, e.g., in an enrythroid lineage cell, is impaired or down-regulated. In an embodiment, the cell is a hemopoietic stem cell or progenitor cell.

### Sickle Cell Diseases

[0533] Sickle cell disease is a group of disorders that affects hemoglobin. People with this disorder have atypical hemoglobin molecules (hemoglobin S), which can distort red blood cells into a sickle, or crescent, shape. Characteristic features of this disorder include a low number of red blood cells (anemia), repeated infections, and periodic episodes of pain.

[0534] Mutations in the HBB gene cause sickle cell disease. T e HBB gene provides instructions for making beta-globin. Various versions of beta-globin result from different mutations in the HBB gene. One particular HBB gene mutation produces an abnormal version of beta-globin known as hemoglobin S (HbS). Other mutations in the HBB gene lead to additional abnormal versions of beta-globin such as hemoglobin C (HbC) and hemoglobin E (HbE). HBB gene mutations can also result in an unusually low level of beta-globin, i.e., beta thalassemia.

[0535] In people with sickle cell disease, at least one of the beta-globin subunits in hemoglobin is replaced with hemoglobin S. In sickle cell anemia, which is a common form of sickle cell disease, hemoglobin S replaces both beta-globin subunits in hemoglobin. In other types of sickle cell disease, just one beta-globin subunit in hemoglobin is replaced with hemoglobin S. The other beta-globin subunit is replaced with a different abnormal variant, such as hemoglobin C. For example, people with sickle-hemoglobin C (HbSC) disease have hemoglobin molecules with hemoglobin S and hemoglobin C instead of beta-globin. If mutations that produce hemoglobin S and beta thalassemia occur together, individuals have hemoglobin S-beta thalassemia (HbSBetaThal) disease.

### Beta Thalassemia

[0536] Beta thalassemia is a blood disorder that reduces the production of hemoglobin. In people with beta thalassemia, low levels of hemoglobin lead to a lack of oxygen in many parts of the body. Affected individuals also have a shortage of red blood cells (anemia), which can cause pale skin, weakness, fatigue, and more serious complications. People with beta thalassemia are at an increased risk of developing abnormal blood clots.

[0537] Beta thalassemia is classified into two types depending on the severity of symptoms: thalassemia major (also known as Cooley's anemia) and thalassemia intermedia. Of the two types, thalassemia major is more severe.

[0538] Mutations in the HBB gene cause beta thalassemia. The HBB gene provides instructions for making beta-globin. Some mutations in the HBB gene prevent the production of any beta-globin. The absence of beta-globin is referred to as beta-zero (Bº) thalassemia. Other HBB gene mutations allow some beta-globin to be produced but in reduced amounts, i.e., beta-plus (B⁺) thalassemia. People with both types have been diagnosed with thalassemia major and thalassemia intermedia.

[0539] In an embodiment, a Cas9 molecule/gRNA molecule complex targeting a first gene is used to treat a disorder characterized by second gene, e.g., a mutation in a second gene. By way of example, targeting of the first gene, e.g., by editing or payload delivery, can compensate for, or inhibit further damage from, the affect of a second gene, e.g., a mutant second gene. In an embodiment the allele(s) of the first gene carried by the subject is not causative of the disorder.

[0540] In one aspect, the invention relates to the treatment of a mammal, e.g., a human, in need of increased fetal hemoglobin (HbF).

[0541] In one aspect, the invention relates to the treatment of a mammal, e.g., a human, that has been diagnosed with, or is at risk of developing, a hemoglobinopathy.

[0542] In one aspect, the hemoglobinopathy is a β-hemoglobinopathy. In one aspect, the hemoglobinopathy is sickle cell disease. In one aspect, the hemoglobinopathy is beta thalassemia.

### Methods of Treatment of Hemoglobinopathies

[0543] In another aspect the invention provides methods of treatment. In aspects, the gRNA molecules, CRISPR systems and/or cells of the invention are used to treat a patient in need thereof. In aspects, the patient is a mammal, e.g., a human. In aspects, the patient has a hemoglobinopathy. In embodiments, the patient has sickle cell disease. In embodiments, the patient has beta thalassemia.

[0544] In one aspect, the method of treatment comprises administering to a mammal, e.g., a human, one or more gRNA molecules, e.g., one or more gRNA molecules comprising a targeting domain described in Table 1, 2, 3, 4, 5, 6, 7, 8, or 9, and one or more cas9 molecules described herein.

[0545] In one aspect, the method of treatment comprises administering to a mammal a cell population, wherein the cell population is a cell population from a mammal, e.g., a human, that has been administered one or more gRNA molecules, e.g., one or more gRNA molecules comprising a targeting domain described in Table 1, 2, 3, 4, 5, 6, 7, 8, or 9, and one or more cas9 molecules described herein, e.g., a CRISPR system as described herein. In one embodiment, the administration of the one or more gRNA molecules or CRISPR systems to the cell is accomplished in vivo. In one embodiment the administration of the one or more gRNA molecules or CRISPR systems to the cell is accomplished ex vivo.

[0546] In one aspect, the method of treatment comprises administering to the mammal, e.g., the human, an effective amount of a cell population comprising cells which comprise or at one time comprised one or more gRNA molecules, e.g., one or more gRNA molecules comprising a targeting domain described in Table 1, 2, 3, 4, 5, 6, 7, 8, or 9, and one or more cas9 molecules described herein, or the progeny of said cells. In one embodiment, the cells are allogeneic to the mammal. In one embodiment, the cells are autologous to the mammal. In one embodiment the cells are harvested from the mammal, manipulated ex vivo, and returned to the mammal.

[0547] In aspects, the cells comprising or which at one time comprised one or more gRNA molecules, e.g., one or more gRNA molecules comprising a targeting domain described in Table 1, 2, 3, 4, 5, 6, 7, 8, or 9, and one or more cas9 molecules described herein, or the progeny of said cells, comprise stem cells or progenitor cells. In one aspect, the stem cells are hematopoietic stem cells. In one aspect, the progenitor cells are hematopoietic progenitor cells. In one aspect, the cells comprise both hematopoietic stem cells and hematopoietic progenitor cells, e.g., are HSPCs. In one aspect, the cells comprise, e.g., consist of, CD34+ cells. In one aspect the cells are substantially free of CD34− cells. In one aspect, the cells comprise, e.g., consist of, CD34+/CD90+ stem cells. In one aspect, the cells comprise, e.g., consist of, CD34+/CD90− cells. In an aspect, the cells are a population comprising one or more of the cell types described above or described herein.

[0548] In one embodiment, the disclosure provides a method for treating a hemoglobinopathy, e.g., sickle cell disease or beta-thalassemia, or a method for increasing fetal hemoglobin expression in a mammal, e.g., a human, in need thereof, the method comprising:

a) providing, e.g., harvesting or isolating, a population of HSPCs (e.g., CD34+ cells) from a mammal;
b) providing said cells ex vivo, e.g., in a cell culture medium, optionally in the presence of an effective amount of a composition comprising at least one stem cell expander, whereby said population of HSPCs (e.g., CD34+ cells) expands to a greater degree than an untreated population;
c) contacting the population of HSPCs (e.g., CD34+ cells) with an effective amount of: a composition comprising at least one gRNA molecule comprising a targeting domain described herein, e.g., a targeting domain described in Tables 1, 2, 3, 4, 5, 6, 7, 8, or 9, or a nucleic acid encoding said gRNA molecule, and at least one cas9 molecule, e.g., described herein, or a nucleic acid encoding said cas9 molecule, e.g., one or more RNPs as described herein, e.g., with a CRISPR system described herein;
d) causing at least one modification in at least a portion of the cells of the population (e.g., at least a portion of the HSPCs, e.g., CD34+ cells, of the population), whereby, e.g., when said HSPCs are differentiated into cells of an erythroid lineage, e.g., red blood cells, fetal hemoglobin expression is increased, e.g., relative to cells not contacted according to step c); and
f) returning a population of cells comprising said modified HSPCs (e.g., CD34+ cells) to the mammal.

[0549] In an aspect, the HSPCs are allogeneic to the mammal to which they are returned. In an aspect, the HSPCs are autologous to the mammal to which they are returned. In aspects, the HSPCs are isolated from bone marrow. In aspects, the HSPCs are isolated from peripheral blood, e.g., mobilized peripheral blood. In aspects, the moblized peripheral blood is isolated from a subject who has been administered a G-CSF. In aspects, the moblized peripheral blood is isolated from a subject who has been administered a moblization agent other than G-CSF, for example, Plerixafor® (AMD3100). In aspects, the HSPCs are isolated from umbilical cord blood.

[0550] In further embodiments of the method, the method further comprises, after providing a population of HSPCs (e.g., CD34+ cells), e.g., from a source described above, the step of enriching the population of cells for HSPCs (e.g., CD34+ cells). In embodiments of the method, after said enriching, the population of cells, e.g., HSPCs, is substantially free of CD34− cells.

[0551] In embodiments, the population of cells which is returned to the mammal includes at least 70% viable cells. In embodiments, the population of cells which is returned to the mammal includes at least 75% viable cells. In embodiments, the population of cells which is returned to the mammal includes at least 80% viable cells. In embodiments, the population of cells which is returned to the mammal includes at least 85% viable cells. In embodiments, the population of cells which is returned to the mammal includes at least 90% viable cells. In embodiments, the population of cells which is returned to the mammal includes at least 95% viable cells. In embodiments, the population of cells which is returned to the mammal includes at least 99% viable cells. Viability can be determined by staining a representative portion of the population of cells for a cell viability marker, e.g., as known in the art.

[0552] In another embodiment, the disclosure provides a method for treating a hemoglobinopathy, e.g., sickle cell disease or beta-thalassemia, or a method for increasing fetal hemoglobin expression in a mammal, e.g., a human, in need thereof, the method comprising the steps of:

a) providing, e.g., harvesting or isolating, a population of HSPCs (e.g., CD34+ cells) of a mammal, e.g., from the bone marrow of a mammal;
b) isolating the CD34+ cells from the population of cells of step a);
c) providing said CD34+ cells ex vivo, and culturing said cells, e.g., in a cell culture medium, in the presence of an effective amount of a composition comprising at least one stem cell expander, e.g., Compound 4, e.g., Compound 4 at a concentration of about 0.5 to about 0.75 micromolar, whereby said population of CD34+ cells expands to a greater degree than an untreated population;
d) introducing into the cells of the population CD34+ cells an effective amount of: a composition comprising a Cas9 molecule, e.g., as described herein, and a gRNA molecule, e.g., as described herein, e.g., optionally where the Cas9 molecule and the gRNA molecule are in the form of an RNP, e.g., as described herein, and optionally where said introduction is by electroporation, e.g., as described herein, of said RNP into said cells;
e) causing at least one genetic modification in at least a portion of the cells of the population (e.g., at least a portion of the HSPCs, e.g., CD34+ cells, of the population), whereby an indel, e.g., as described herein, is created at or near the genomic site complementary to the targeting domain of the gRNA introduced in step d);
f) optionally, additionally culturing said cells after said introducing, e.g., in a cell culture medium, in the presence of an effective amount of a composition comprising at least one stem cell expander, e.g., Compound 4, e.g., Compound 4 at a concentration of about 0.5 to about 0.75 micromolar, such that the cells expand at least 2-fold, e.g., at least 4-fold, e.g., at least 5-fold;
g) cryopreserving said cells; and
h) returning the cells to the mammal, wherein,
[0553] the cells returned to the mammal comprise cells that 1) maintain the ability to differentiate into cells of the erythroid lineage, e.g., red blood cells; 2) when differentiated into red blood cells, produce an increased level of fetal hemoglobin, e.g., relative to cells unmodified by the gRNA of step e), e.g., produce at least 6 picograms fetal hemoglobin per cell.

[0554] In an aspect, the HSPCs are allogeneic to the mammal to which they are returned. In an aspect, the HSPCs are autologous to the mammal to which they are returned. In aspects, the HSPCs are isolated from bone marrow. In aspects, the HSPCs are isolated from peripheral blood, e.g., mobilized peripheral blood. In aspects, the moblized peripheral blood is isolated from a subject who has been administered a G-CSF. In aspects, the moblized peripheral blood is isolated from a subject who has been administered a moblization agent other than G-CSF, for example, Plerixafor® (AMD3100). In aspects, the HSPCs are isolated from umbilical cord blood.

[0555] In embodiments of the method above, the recited step b) results in a population of cells which is substantially free of CD34− cells.

[0556] In further embodiments of the method, the method further comprises, after providing a population of HSPCs (e.g., CD34+ cells), e.g., from a source described above, the population of cells is enriched for HSPCs (e.g., CD34+ cells).

[0557] In a further embodiments of these methods, the population of modified HSPCs (e.g., CD34+ stem cells) having the ability to differentiate increased fetal hemoglobin expression is cryopreserved and stored prior to being reintroduced into the mammal. In embodiments, the cryopreserved population of HSPCs having the ability to differentiate into cells of the erythroid lineage, e.g., red blood cells, and/or when differentiated into cells of the erythroid lineage, e.g., red blood cells, produce an increased level of fetal hemoglobin is thawed and then reintroduced into the mammal. In a further embodiment of these methods, the method comprises chemotherapy and/or radiation therapy to remove or reduce the endogenous hematopoietic progenitor or stem cells in the mammal. In a further embodiment of these methods, the method does not comprise a step of chemotherapy and/or radiation therapy to remove or reduce the endogenous hematopoietic progenitor or stem cells in the mammal. In a further embodiment of these methods, the method comprises a chemotherapy and/or radiation therapy to reduce partially (e.g., partial lymphodepletion) the endogenous hematopoietic progenitor or stem cells in the mammal. In embodiments the patient is treated with a fully lymphodepleting dose of busulfan prior to reintroduction of the modified HSPCs to the mammal. In embodiments, the patient is treated with a partially lymphodepleting dose of busulfan prior to reintroduction of the modified HSPCs to the mammal.

[0558] In embodiments, the cells are contacted with RNP comprising a Cas9 molecule, e.g., as described herein, complexed with a gRNA to the +58 BCL11a enhancer region. In embodiments, the gRNA comprises the targeting domain of CR000312. In embodiments, the gRNA comprises the targeting domain of CR000311. In embodiments, the gRNA comprises the targeting domain of CR001128. In embodiments, the gRNA comprises the targeting domain of CR001125. In embodiments, the gRNA comprises the targeting domain of CR001126. In embodiments, the gRNA comprises the targeting domain of CR001127. In embodiments the gRNA is a dual guide RNA comprising a crRNA comprising, e.g., consisting of, [SEQ ID NO: 248]-[SEQ ID NO: 6607], and a tracr comprising, e.g., consisting of, [SEQ ID NO: 7812], optionally with 1, 2, 3, 4, 5, 6, or 7 additional 3′ uracil nucleotides, e.g., SEQ ID NO: 6660. In embodiments, the gRNA is a sgRNA comprising, e.g., consisting of, [SEQ ID NO: 248]-[SEQ ID NO: 6601, optionally with 1, 2, 3, 4, 5, 6, or 7 additional 3′ uracil nucleotides, e.g., [SEQ ID NO: 248]-[SEQ ID NO: 7811]. In embodiments the gRNA is a dual guide RNA comprising a crRNA comprising, e.g., consisting of, [SEQ ID NO: 247]-[SEQ ID NO: 6607], and a tracr comprising, e.g., consisting of, SEQ ID NO: 7812, optionally with 1, 2, 3, 4, 5, 6, or 7 additional 3′ uracil nucleotides, e.g., SEQ ID NO: 6660. In embodiments, the gRNA is a sgRNA comprising, e.g., consisting of, [SEQ ID NO: 247]-[SEQ ID NO: 6601, optionally with 1, 2, 3, 4, 5, 6, or 7 additional 3′ uracil nucleotides, e.g., [SEQ ID NO: 247]-[SEQ ID NO: 7811]. In embodiments the gRNA is a dual guide RNA comprising a crRNA comprising, e.g., consisting of, [SEQ ID NO: 338]-[SEQ ID NO: 6607], and a tracr comprising, e.g., consisting of, SEQ ID NO: 7812, optionally with 1, 2, 3, 4, 5, 6, or 7 additional 3′ uracil nucleotides, e.g., SEQ ID NO: 6660. In embodiments, the gRNA is a sgRNA comprising, e.g., consisting of, [SEQ ID NO: 338]-[SEQ ID NO: 6601], optionally with 1, 2, 3, 4, 5, 6, or 7 additional 3′ uracil nucleotides, e.g., [SEQ ID NO: 338]-[SEQ ID NO: 7811]. In embodiments the gRNA is a dual guide RNA comprising a crRNA comprising, e.g., consisting of, [SEQ ID NO: 335]-[SEQ ID NO: 6607], and a tracr comprising, e.g., consisting of, SEQ ID NO: 7812, optionally with 1, 2, 3, 4, 5, 6, or 7 additional 3′ uracil nucleotides, e.g., SEQ ID NO: 6660. In embodiments, the gRNA is a sgRNA comprising, e.g., consisting of, [SEQ ID NO: 335]-[SEQ ID NO: 6601], optionally with 1, 2, 3, 4, 5, 6, or 7 additional 3′ uracil nucleotides, e.g., [SEQ ID NO: 335]-[SEQ ID NO: 7811]. In embodiments the gRNA is a dual guide RNA comprising a crRNA comprising, e.g., consisting of, [SEQ ID NO: 336]-[SEQ ID NO: 6607], and a tracr comprising, e.g., consisting of, SEQ ID NO: 7812, optionally with 1, 2, 3, 4, 5, 6, or 7 additional 3′ uracil nucleotides, e.g., SEQ ID NO: 6660. In embodiments, the gRNA is a sgRNA comprising, e.g., consisting of, [SEQ ID NO: 336]-[SEQ ID NO: 6601], optionally with 1, 2, 3, 4, 5, 6, or 7 additional 3′ uracil nucleotides, e.g., [SEQ ID NO: 336]-[SEQ ID NO: 7811]. In embodiments the gRNA is a dual guide RNA comprising a crRNA comprising, e.g., consisting of, [SEQ ID NO: 337]-[SEQ ID NO: 6607], and a tracr comprising, e.g., consisting of, SEQ ID NO: 7812, optionally with 1, 2, 3, 4, 5, 6, or 7 additional 3′ uracil nucleotides, e.g., SEQ ID NO: 6660. In embodiments, the gRNA is a sgRNA comprising, e.g., consisting of, [SEQ ID NO: 337]-[SEQ ID NO: 6601], optionally with 1, 2, 3, 4, 5, 6, or 7 additional 3′ uracil nucleotides, e.g., [SEQ ID NO: 337]-[SEQ ID NO: 7811]. In any of the aforementioned embodiments, any or all of the RNA components of the gRNA may be modified at one or more nucleotides, e.g., as described herein. In embodiments, the gRNA molecule is SEQ ID NO: 342. In embodiments, the gRNA molecule is SEQ ID NO: 343. In embodiments, the gRNA molecule is SEQ ID NO: 1762. In embodiments the gRNA molecule is a dgRNA molecule that consists of SEQ ID NO: 344 and SEQ ID NO: 6660. In embodiments the gRNA molecule is a dgRNA molecule that consists of SEQ ID NO: 344 and SEQ ID NO: 346. In embodiments the gRNA molecule is a dgRNA molecule that consists of SEQ ID NO: 345 and SEQ ID NO: 6660. In embodiments the gRNA molecule is a dgRNA molecule that consists of SEQ ID NO: 345 and SEQ ID NO: 346. In embodiments, the gRNA molecule is SEQ ID NO: 347. In embodiments, the gRNA molecule is SEQ ID NO: 348. In embodiments, the gRNA molecule is SEQ ID NO: 1763. In embodiments the gRNA molecule is a dgRNA molecule that consists of SEQ ID NO: 349 and SEQ ID NO: 6660. In embodiments the gRNA molecule is a dgRNA molecule that consists of SEQ ID NO: 349 and SEQ ID NO: 346. In embodiments the gRNA molecule is a dgRNA molecule that consists of SEQ ID NO: 350 and SEQ ID NO: 6660. In embodiments the gRNA molecule is a dgRNA molecule that consists of SEQ ID NO: 350 and SEQ ID NO: 346. In embodiments, the gRNA molecule is SEQ ID NO: 351. In embodiments, the gRNA molecule is SEQ ID NO: 352. In embodiments, the gRNA molecule is SEQ ID NO: 1764. In embodiments the gRNA molecule is a dgRNA molecule that consists of SEQ ID NO: 353 and SEQ ID NO: 6660. In embodiments the gRNA molecule is a dgRNA molecule that consists of SEQ ID NO: 353 and SEQ ID NO: 346. In embodiments the gRNA molecule is a dgRNA molecule that consists of SEQ ID NO: 354 and SEQ ID NO: 6660. In embodiments the gRNA molecule is a dgRNA molecule that consists of SEQ ID NO: 354 and SEQ ID NO: 346. In embodiments, the gRNA molecule is SEQ ID NO: 355. In embodiments, the gRNA molecule is SEQ ID NO: 356. In embodiments, the gRNA molecule is SEQ ID NO: 1765. In embodiments the gRNA molecule is a dgRNA molecule that consists of SEQ ID NO: 357 and SEQ ID NO: 6660. In embodiments the gRNA molecule is a dgRNA molecule that consists of SEQ ID NO: 357 and SEQ ID NO: 346. In embodiments the gRNA molecule is a dgRNA molecule that consists of SEQ ID NO: 358 and SEQ ID NO: 6660. In embodiments the gRNA molecule is a dgRNA molecule that consists of SEQ ID NO: 358 and SEQ ID NO: 346. In embodiments, the gRNA molecule is SEQ ID NO: 359. In embodiments, the gRNA molecule is SEQ ID NO: 360. In embodiments, the gRNA molecule is SEQ ID NO: 1766. In embodiments the gRNA molecule is a dgRNA molecule that consists of SEQ ID NO: 361 and SEQ ID NO: 6660. In embodiments the gRNA molecule is a dgRNA molecule that consists of SEQ ID NO: 361 and SEQ ID NO: 346. In embodiments the gRNA molecule is a dgRNA molecule that consists of SEQ ID NO: 362 and SEQ ID NO: 6660. In embodiments the gRNA molecule is a dgRNA molecule that consists of SEQ ID NO: 362 and SEQ ID NO: 346. In embodiments, the gRNA molecule is SEQ ID NO: 363. In embodiments, the gRNA molecule is SEQ ID NO: 364. In embodiments, the gRNA molecule is SEQ ID NO: 1767. In embodiments the gRNA molecule is a dgRNA molecule that consists of SEQ ID NO: 365 and SEQ ID NO: 6660. In embodiments the gRNA molecule is a dgRNA molecule that consists of SEQ ID NO: 365 and SEQ ID NO: 346. In embodiments the gRNA molecule is a dgRNA molecule that consists of SEQ ID NO: 366 and SEQ ID NO: 6660. In embodiments the gRNA molecule is a dgRNA molecule that consists of SEQ ID NO: 366 and SEQ ID NO: 346. In embodiments, the gRNA molecule is SEQ ID NO: 367. In embodiments, the gRNA molecule is SEQ ID NO: 368. In embodiments, the gRNA molecule is SEQ ID NO: 1768. In embodiments the gRNA molecule is a dgRNA molecule that consists of SEQ ID NO: 369 and SEQ ID NO: 6660. In embodiments the gRNA molecule is a dgRNA molecule that consists of SEQ ID NO: 369 and SEQ ID NO: 346. In embodiments the gRNA molecule is a dgRNA molecule that consists of SEQ ID NO: 370 and SEQ ID NO: 6660. In embodiments the gRNA molecule is a dgRNA molecule that consists of SEQ ID NO: 370 and SEQ ID NO: 346. In embodiments, the gRNA molecule is SEQ ID NO: 371. In embodiments, the gRNA molecule is SEQ ID NO: 372. In embodiments, the gRNA molecule is SEQ ID NO: 1769. In embodiments the gRNA molecule is a dgRNA molecule that consists of SEQ ID NO: 373 and SEQ ID NO: 6660. In embodiments the gRNA molecule is a dgRNA molecule that consists of SEQ ID NO: 373 and SEQ ID NO: 346. In embodiments the gRNA molecule is a dgRNA molecule that consists of SEQ ID NO: 374 and SEQ ID NO: 6660. In embodiments the gRNA molecule is a dgRNA molecule that consists of SEQ ID NO: 374 and SEQ ID NO: 346.

[0559] In embodiments, the cells are contacted with RNP comprising a Cas9 molecule, e.g., as described herein, complexed with a gRNA to the HPFH region. In embodiments, the gRNA comprises the targeting domain of CR001030. In embodiments, the gRNA comprises the targeting domain of CR001028. In embodiments, the gRNA comprises the targeting domain of CR001221. In embodiments, the gRNA comprises the targeting domain of CR001137. In embodiments, the gRNA comprises the targeting domain of CR003035. In embodiments, the gRNA comprises the targeting domain of CR003085. In embodiments the gRNA is a dual guide RNA comprising a crRNA comprising, e.g., consisting of, [SEQ ID NO: 98]-[SEQ ID NO: 6607], and a tracr comprising, e.g., consisting of, SEQ ID NO: 7812, optionally with 1, 2, 3, 4, 5, 6, or 7 additional 3′ uracil nucleotides, e.g., SEQ ID NO: 6660. In embodiments, the gRNA is a sgRNA comprising, e.g., consisting of, [SEQ ID NO: 98]-[SEQ ID NO: 6601], optionally with 1, 2, 3, 4, 5, 6, or 7 additional 3′ uracil nucleotides, e.g., [SEQ ID NO: 98]-[SEQ ID NO: 7811]. In embodiments the gRNA is a dual guide RNA comprising a crRNA comprising, e.g., consisting of, [SEQ ID NO: 100]-[SEQ ID NO: 6607], and a tracr comprising, e.g., consisting of, SEQ ID NO: 7812, optionally with 1, 2, 3, 4, 5, 6, or 7 additional 3′ uracil nucleotides, e.g., SEQ ID NO: 6660. In embodiments, the gRNA is a sgRNA comprising, e.g., consisting of, [SEQ ID NO: 100]-[SEQ ID NO: 6601], optionally with 1, 2, 3, 4, 5, 6, or 7 additional 3′ uracil nucleotides, e.g., [SEQ ID NO: 100]-[SEQ ID NO: 7811]. In embodiments the gRNA is a dual guide RNA comprising a crRNA comprising, e.g., consisting of, [SEQ ID NO: 1589]-[SEQ ID NO: 6607], and a tracr comprising, e.g., consisting of, SEQ ID NO: 7812, optionally with 1, 2, 3, 4, 5, 6, or 7 additional 3′ uracil nucleotides, e.g., SEQ ID NO: 6660. In embodiments, the gRNA is a sgRNA comprising, e.g., consisting of, [SEQ ID NO: 1589]-[SEQ ID NO: 6601], optionally with 1, 2, 3, 4, 5, 6, or 7 additional 3′ uracil nucleotides, e.g., [SEQ ID NO: 1589]-[SEQ ID NO: 7811]. In embodiments the gRNA is a dual guide RNA comprising a crRNA comprising, e.g., consisting of, [SEQ ID NO: 1505]-[SEQ ID NO: 6607], and a tracr comprising, e.g., consisting of, SEQ ID NO: 7812, optionally with 1, 2, 3, 4, 5, 6, or 7 additional 3′ uracil nucleotides, e.g., SEQ ID NO: 6660. In embodiments, the gRNA is a sgRNA comprising, e.g., consisting of, [SEQ ID NO: 1505]-[SEQ ID NO: 6601], optionally with 1, 2, 3, 4, 5, 6, or 7 additional 3′ uracil nucleotides, e.g., [SEQ ID NO: 1505]-[SEQ ID NO: 7811]. In embodiments the gRNA is a dual guide RNA comprising a crRNA comprising, e.g., consisting of, [SEQ ID NO: 1700]-[SEQ ID NO: 6607], and a tracr comprising, e.g., consisting of, SEQ ID NO: 7812, optionally with 1, 2, 3, 4, 5, 6, or 7 additional 3′ uracil nucleotides, e.g., SEQ ID NO: 6660. In embodiments, the gRNA is a sgRNA comprising, e.g., consisting of, [SEQ ID NO: 1700]-[SEQ ID NO: 6601], optionally with 1, 2, 3, 4, 5, 6, or 7 additional 3′ uracil nucleotides, e.g., [SEQ ID NO: 1700]-[SEQ ID NO: 7811]. In embodiments the gRNA is a dual guide RNA comprising a crRNA comprising, e.g., consisting of, [SEQ ID NO: 1750]-[SEQ ID NO: 6607], and a tracr comprising, e.g., consisting of, SEQ ID NO: 7812, optionally with 1, 2, 3, 4, 5, 6, or 7 additional 3′ uracil nucleotides, e.g., SEQ ID NO: 6660. In embodiments, the gRNA is a sgRNA comprising, e.g., consisting of, [SEQ ID NO: 1750]-[SEQ ID NO: 6601], optionally with 1, 2, 3, 4, 5, 6, or 7 additional 3′ uracil nucleotides, e.g., [SEQ ID NO: 1750]-[SEQ ID NO: 7811]. In embodiments, the gRNA molecule is SEQ ID NO: 375. In embodiments, the gRNA molecule is SEQ ID NO: 376. In embodiments, the gRNA molecule is SEQ ID NO: 1770. In embodiments the gRNA molecule is a dgRNA molecule that consists of SEQ ID NO: 377 and SEQ ID NO: 6660. In embodiments the gRNA molecule is a dgRNA molecule that consists of SEQ ID NO: 377 and SEQ ID NO: 346. In embodiments the gRNA molecule is a dgRNA molecule that consists of SEQ ID NO: 378 and SEQ ID NO: 6660. In embodiments the gRNA molecule is a dgRNA molecule that consists of SEQ ID NO: 378 and SEQ ID NO: 346. In embodiments, the gRNA molecule is SEQ ID NO: 379. In embodiments, the gRNA molecule is SEQ ID NO: 380. In embodiments, the gRNA molecule is SEQ ID NO: 1771. In embodiments the gRNA molecule is a dgRNA molecule that consists of SEQ ID NO: 381 and SEQ ID NO: 6660. In embodiments the gRNA molecule is a dgRNA molecule that consists of SEQ ID NO: 381 and SEQ ID NO: 346. In embodiments the gRNA molecule is a dgRNA molecule that consists of SEQ ID NO: 382 and SEQ ID NO: 6660. In embodiments the gRNA molecule is a dgRNA molecule that consists of SEQ ID NO: 382 and SEQ ID NO: 346. In embodiments, the gRNA molecule is SEQ ID NO: 383. In embodiments, the gRNA molecule is SEQ ID NO: 384. In embodiments, the gRNA molecule is SEQ ID NO: 1772. In embodiments the gRNA molecule is a dgRNA molecule that consists of SEQ ID NO: 385 and SEQ ID NO: 6660. In embodiments the gRNA molecule is a dgRNA molecule that consists of SEQ ID NO: 385 and SEQ ID NO: 346. In embodiments the gRNA molecule is a dgRNA molecule that consists of SEQ ID NO: 386 and SEQ ID NO: 6660. In embodiments the gRNA molecule is a dgRNA molecule that consists of SEQ ID NO: 386 and SEQ ID NO: 346. In embodiments, the gRNA molecule is SEQ ID NO: 387. In embodiments, the gRNA molecule is SEQ ID NO: 388. In embodiments, the gRNA molecule is SEQ ID NO: 1773. In embodiments the gRNA molecule is a dgRNA molecule that consists of SEQ ID NO: 389 and SEQ ID NO: 6660. In embodiments the gRNA molecule is a dgRNA molecule that consists of SEQ ID NO: 389 and SEQ ID NO: 346. In embodiments the gRNA molecule is a dgRNA molecule that consists of SEQ ID NO: 390 and SEQ ID NO: 6660. In embodiments the gRNA molecule is a dgRNA molecule that consists of SEQ ID NO: 390 and SEQ ID NO: 346. In embodiments, the gRNA molecule is SEQ ID NO: 391. In embodiments, the gRNA molecule is SEQ ID NO: 392. In embodiments, the gRNA molecule is SEQ ID NO: 1774. In embodiments the gRNA molecule is a dgRNA molecule that consists of SEQ ID NO: 393 and SEQ ID NO: 6660. In embodiments the gRNA molecule is a dgRNA molecule that consists of SEQ ID NO: 393 and SEQ ID NO: 346. In embodiments the gRNA molecule is a dgRNA molecule that consists of SEQ ID NO: 394 and SEQ ID NO: 6660. In embodiments the gRNA molecule is a dgRNA molecule that consists of SEQ ID NO: 394 and SEQ ID NO: 346. In embodiments, the gRNA molecule is SEQ ID NO: 395. In embodiments, the gRNA molecule is SEQ ID NO: 396. In embodiments, the gRNA molecule is SEQ ID NO: 1775. In embodiments the gRNA molecule is a dgRNA molecule that consists of SEQ ID NO: 397 and SEQ ID NO: 6660. In embodiments the gRNA molecule is a dgRNA molecule that consists of SEQ ID NO: 397 and SEQ ID NO: 346. In embodiments the gRNA molecule is a dgRNA molecule that consists of SEQ ID NO: 398 and SEQ ID NO: 6660. In embodiments the gRNA molecule is a dgRNA molecule that consists of SEQ ID NO: 398 and SEQ ID NO: 346.

[0560] In embodiments, the stem cell expander is Compound 1. In embodiments, the stem cell expander is Compound 2. In embodiments, the stem cell expander is Compound 3. In embodiments, the stem cell expander is Compound 4. In embodiments, the stem cell expander is Compound 4 and is present at a concentration of 2-0.1 micromolar, e.g., 1-0.25 micromolar, e.g., 0.75-0.5 micromolar. In embodiments, the stem cell expander is a molecule described in WO2010/059401 (e.g., the molecule described in Example 1 of WO2010/059401).

[0561] In embodiments, the cells, e.g., HSPCs, e.g., as described herein, are cultured ex vivo for a period of about 1 hour to about 15 days, e.g., a period of about 12 hours to about 12 days, e.g., a period of about 12 hours to 4 days, e.g., a period of about 1 day to about 4 days, e.g., a period of about 1 day to about 2 days, e.g., a period of about 1 day or a period of about 2 days, prior to the step of contacting the cells with a CRISPR system, e.g., described herein. In embodiments, said culturing prior to said contacting step is in a composition (e.g., a cell culture medium) comprising a stem cell expander, e.g., described herein, e.g., compound 4, e.g., compound 4 at a concentration of about 0.25 uM to about 1 uM, e.g., compound 4 at a concentration of about 0.75-0.5 micromolar. In embodiments, the cells are cultured ex vivo for a period of no more than about about 1 day, e.g., no more than about 18, 17, 16, 15, 14, 13, 12, 11, 10, 9, 8, 7, 6, 5, 4, 3, 2, or 1 hour(s) after the step of contacting the cells with a CRISPR system, e.g., described herein, e.g., in a cell culture medium which comprises a stem cell expander, e.g., described herein, e.g., compound 4, e.g., compound 4 at a concentration of about 0.25 uM to about 1 uM, e.g., compound 4 at a concentration of about 0.75-0.5 micromolar. In other embodiments, the cells are cultured ex vivo for a period of about 1 hour to about 15 days, e.g., a period of about 12 hours to about 10 days, e.g., a period of about 1 day to about 10 days, e.g., a period of about 1 day to about 5 days, e.g., a period of about 1 thy to about 4 days, e.g., a period of about 2 days to about 4 days, e.g., a period of about 2 days, about 3 days or about 4 days, after the step of contacting the cells with a CRISPR system, e.g., described herein, in a cell culture medium, e.g., which comprises a stem cell expander, e.g., described herein, e.g., compound 4, e.g., compound 4 at a concentration of about 0.25 uM to about 1 uM, e.g., compound 4 at a concentration of about 0.75-0.5 micromolar. In embodiments, the cells are cultured ex vivo (e.g., cultured prior to said contacting step and/or cultured after said contacting step) for a period of about 1 hour to about 20 days, e.g., a period of about 6-12 days, e.g., a period of about 6, about 7, about 8, about 9, about 10, about 11, or about 12 days.

[0562] In embodiments, the population of cells comprising the modified HSPCs returned to the mammal comprises at least about 1 million cells (e.g., at least about 1 million CD34+ cells) per kg. In embodiments, the population of cells comprising the modified HSPCs returned to the mammal comprises at least about 2 million cells (e.g., at least about 2 million CD34+ cells) per kg. In embodiments, the population of cells comprising the modified HSPCs returned to the mammal comprises at least about 3 million cells (e.g., at least about 3 million CD34+ cells) per kg. In embodiments, the population of cells comprising the modified HSPCs returned to the mammal comprises at least about 4 million cells (e.g., at least about 4 million CD34+ cells) per kg. In embodiments, the population of cells comprising the modified HSPCs returned to the mammal comprises at least about 5 million cells (e.g., at least about 5 million CD34+ cells) per kg. In embodiments, the population of cells comprising the modified HSPCs returned to the mammal comprises at least about 6 million cells (e.g., at least about 6 million CD34+ cells) per kg. In embodiments, the population of cells comprising the modified HSPCs returned to the mammal comprises at least 1 million cells (e.g., at least 1 million CD34+ cells) per kg. In embodiments, the population of cells comprising the modified HSPCs returned to the mammal comprises at least 2 million cells (e.g., at least 2 million CD34+ cells) per kg. In embodiments, the population of cells comprising the modified HSPCs returned to the mammal comprises at least 3 million cells (e.g., at least 3 million CD34+ cells) per kg. In embodiments, the population of cells comprising the modified HSPCs returned to the mammal comprises at least 4 million cells (e.g., at least 4 million CD34+ cells) per kg. In embodiments, the population of cells comprising the modified HSPCs returned to the mammal comprises at least 5 million cells (e.g., at least 5 million CD34+ cells) per kg. In embodiments, the population of cells comprising the modified HSPCs returned to the mammal comprises at least 6 million cells (e.g., at least 6 million CD34+ cells) per kg. In embodiments, the population of cells comprising the modified HSPCs returned to the mammal comprises about 1 million cells (e.g., about 1 million CD34+ cells) per kg. In embodiments, the population of cells comprising the modified HSPCs returned to the mammal comprises about 2 million cells (e.g., about 2 million CD34+ cells) per kg. In embodiments, the population of cells comprising the modified HSPCs returned to the mammal comprises about 3 million cells (e.g., about 3 million CD34+ cells) per kg. In embodiments, the population of cells comprising the modified HSPCs returned to the mammal comprises about 4 million cells (e.g., about 4 million CD34+ cells) per kg. In embodiments, the population of cells comprising the modified HSPCs returned to the mammal comprises about 5 million cells (e.g., about 5 million CD34+ cells) per kg. In embodiments, the population of cells comprising the modified HSPCs returned to the mammal comprises about 6 million cells (e.g., about 6 million CD34+ cells) per kg. In embodiments, the population of cells comprising the modified HSPCs returned to the mammal comprises about 2×10⁶ cells per kg body weight of the patient. In embodiments, the population of cells comprising the modified HSPCs returned to the mammal comprises at least 2×10⁶ cells per kg body weight of the patient.

[0563] In embodiments, any of the methods described above results in the patient having at least 80% of its circulating CD34+ cells comprising an indel at or near the genomic site complementary to the targeting domain of the gRNA molecule used in the method, e.g., as measured at least 15 days, e.g., at least 20, at least 30, at least 40 at least 50 or at least 60 days after reintroduction of the cells into the mammal.

[0564] In embodiments, any of the methods described above results in the patient having at least 20% of its bone marrow CD34+ cells comprising an indel at or near the genomic site complementary to the targeting domain of the gRNA molecule used in the method, e.g., as measured at least 15 days, e.g., at least 20, at least 30, at least 40 at least 50 or at least 60 days after reintroduction of the cells into the mammal.

[0565] In embodiments, the HSPCs that are reintroduced into the mammal are able to differentiate in vivo into cells of the erythroid lineage, e.g., red blood cells, and said differentiated cells exhibit increased fetal hemoglobin levels, e.g., produce at least 6 picograms fetal hemoglobin per cell, e.g., at least 7 picograms fetal hemoglobin per cell, at least 8 picograms fetal hemoglobin per cell, at least 9 picograms fetal hemoglobin per cell, at least 10 picograms fetal hemoglobin per cell, e.g., between about 9 and about 10 picograms fetal hemoglobin per cell, e.g., such that the hemoglobinopathy is treated the mammal.

[0566] It will be understood that when a cell is characterized as having increased fetal hemoglobin, that includes embodiments in which a progeny, e.g., a differentiated progeny, of that cell exhibits increased fetal hemoglobin. For example, in the methods described herein, the altered or modified CD34+ cell (or cell population) may not express increased fetal hemoglobin, but when differentiated into cells of erythroid lineage, e.g., red blood cells, the cells express increased fetal hemoglobin, e.g., increased fetal hemoglobin relative to an unmodified or unaltered cell under similar conditions.

### XII. Culture Methods and Methods of Manufacturing Cells

[0567] The disclosure provides methods of culturing cells, e.g., HSPCs, e.g., hematopoietic stem cells, e.g., CD34+ cells modified, or to be modified, with the gRNA molecules described herein.

### DNA Repair Pathway Inhibitors

[0568] Without being bound by theory, it is believed that the pattern of indels produced by a given gRNA molecule at a particular target sequence is a product of each of the active DNA repair mechamisms within the cell (e.g., non-homologous end joining, microhomology-mediated end joining, etc.). Wihtout being bound by theory, it is believed that a particularly favorable indel may be selected for or enriched for by contacting the cells to be edited with an inhibitor of a DNA repair pathway that does not produce the desired indel. Thus, the gRNA molecules, CRISPR systems, methods and other aspects of the invention may be performed in combination with such inhibitors. Examples of such inhibitors include those described in, e.g., WO2014/130955, the contents of which are hereby incorporated by reference in their entirety. In embodiment, the inhibitor is a DNAPKc inhibitor, e.g., NU7441.

### Stem Cell Expanders

[0569] In one aspect the invention relates to culturing the cells, e.g., HSPCs, e.g., CD34+ cells modified, or to be modified, with the gRNA molecules described herein, with one or more agents that result in an increased expansion rate, increased expansion level, or increased engraftment relative to cells not treated with the agent. Such agents are referred to herein as stem cell expanders.

[0570] In an aspect, the one or more agents that result in an increased expansion rate or increased expansion level, relative to cells not treated with the agent, e.g., the stem cell expander, comprises an agent that is an inhibitor of the aryl hydrocarbon receptor (AHR) pathway. In aspects, the stem cell expander is a compound disclosed in WO2013/110198 or a compound disclosed in WO2010/059401, the contents of which are incorporated by reference in their entirety.

[0571] In one aspect, the one or more agents that result in an increased expansion rate or increased expansion level, relative to cells not treated with the agent, is a pyrimido[4,5-b]indole derivative, e.g., as disclosed in WO2013/110198, the contents of which are hereby incorporated by reference in their entirety. In one embodiment the agent is compound 1 ((1r,4r)-N¹-(2-benzyl-7-(2-methyl-2H-tetrazol-5-yl)-9H-pyrimido[4,5-b]indol-4-yl)cyclohexane-1,4-diamine):

### Compound 1

[chemical structure]

[0573] In another aspect, the agent is Compound 2 (methyl 4-(3-piperidin-1-ylpropylamino)-9H-pyrimido[4,5-b]indole-7-carboxylate):

### Compound 2:

[chemical structure]

[0575] In another aspect, the one or more agents that result in an increased expansion rate or increased expansion level, relative to cells not treated with the agent, is an agent disclosed in WO2010/059401, the contents of which are hereby incorporated by reference in their entirety.

[0576] In one embodiment, the stem cell expander is 4-(2-(2-(benzo[b]thiophen-3-yl)-9-isopropyl-9H-purin-6-ylamino)ethyl)phenol, i.e., is the compound from example 1 of WO2010/059401, having the following structure:

### Compound 3:

[chemical structure]

[0578] In another aspect, the stem cell expander is compound 4 ((S)-2-(6-(2-(1H-indol-3-yl)ethylamino)-2-(5-fluoropyridin-3-yl)-9H-purin-9-yl)propan-1-ol, i.e., is the compound 157S according to WO2010/059401), having the following structure:

### Compound 4:

[chemical structure]

[0580] In embodiments the population of HSPCs is contacted with the stem cell expander, e.g., compound 1, compound 2, compound 3, compound 4, or combinations thereof (e.g., a combination of compound 1 and compound 4) before introduction of the CRISPR system (e.g., gRNA molecule and/or Cas9 molecule of the invention) to said HSPCs. In embodiments, the population of HSPCs is contacted with the stem cell expander, e.g., compound 1, compound 2, compound 3, compound 4, or combinations thereof (e.g., a combination of compound 1 and compound 4), after introduction of the CRISPR system (e.g., gRNA molecule and/or Cas9 molecule of the invention) to said HSPCs. In embodiments, the population of HSPCs is contacted with the stem cell expander, e.g., compound 1, compound 2, compound 3, compound 4, or combinations thereof (e.g., a combination of compound 1 and compound 4), both before and after introduction of the CRISPR system (e.g., gRNA molecule and/or Cas9 molecule of the invention) to said HSPCs.

[0581] In embodiments, the stem cell expander is present in an effective amount to increase the expansion level of the HSPCs, relative to HSPCs in the same media but for the absence of the stem cell expander. In embodiments, the stem cell expander is present at a concentration ranging from about 0.01 to about 10 uM, e.g., from about 0.1 uM to about 1 uM. In embodiments, the stem cell expander is present in the cell culture medium at a concentration of about 1 uM, about 950 nM, about 900 nM, about 850 nM, about 800 nM, about 750 nM, about 700 nM, about 650 nM, about 600 nM, about 550 nM, about 500 nM, about 450 nM, about 400 nM, about 350 nM, about 300 nM, about 250 nM, about 200 nM, about 150 nM, about 100 nM, about 50 nM, about 25 nM, or about 10 nM. In embodiments, the stem cell expander is present at a concentration ranging from about 500 nM to about 750 nM.

[0582] In embodiments, the stem cell expander is compound 4, which is present in the cell culture medium at a concentration ranging from about 0.01 to about 10 micromolar (uM). In embodiments, the stem cell expander is compound 4, which is present in the cell culture medium at a concentration ranging from about 0.1 to about 1 micromolar (uM). In embodiments, the stem cell expander is compound 4, which is present in the cell culture medium at a concentration of about 0.75 micromolar (uM). In embodiments, the stem cell expander is compound 4, which is present in the cell culture medium at a concentration of about 0.5 micromolar (uM). In embodiments of any of the foregoing, the cell culture medium additionally comprises compound 1.

[0583] In embodiments, the stem cell expander is a mixture of compound 1 and compound 4.

[0584] In embodiments, the cells of the invention are contacted with one or more stem cell expander molecules for a sufficient time and in a sufficient amount to cause a 2 to 10,000-fold expansion of CD34+ cells, e.g., a 2-1000-fold expansion of CD34+ cells, e.g., a 2-100-fold expansion of CD34+ cells, e.g., a 20-200-fold expansion of CD34+ cells. As described herein, the contacting with the one or more stem cell expanders may be before the cells are contacted with a CRISPR system, e.g., as described herein, after the cells are contacted with a CRISPR system, e.g., as described herein, or a combination thereof. In an embodiment, the cells are contacted with one or more stem cell expander molecules, e.g., Compound 4, for a sufficient time and in a sufficient amount to cause at least a 2-fold expansion of CD34+ cells, e.g., CD34+ cells comprising an indel at or near the target site having complementarity to the targeting domain of the gRNA of the CRISPR/Cas9 system introduced into said cell. In an embodiment, the cells are contacted with one or more stem cell expander molecules, e.g., Compound 4, for a sufficient time and in a sufficient amount to cause at least a 4-fold expansion of CD34+ cells, e.g., CD34+ cells comprising an indel at or near the target site having complementarity to the targeting domain of the gRNA of the CRISPR/Cas9 system introduced into said cell. In an embodiment, the cells are contacted with one or more stem cell expander molecules, e.g., Compound 4, for a sufficient time and in a sufficient amount to cause at least a 5-fold expansion of CD34+ cells, e.g., CD34+ cells comprising an indel at or near the target site having complementarity to the targeting domain of the gRNA of the CRISPR/Cas9 system introduced into said cell. In an embodiment, the cells are contacted with one or more stem cell expander molecules for a sufficient time and in a sufficient amount to cause at least a 10-fold expansion of CD34+ cells. In an embodiment, the cells are contacted with one or more stem cell expander molecules for a sufficient time and in a sufficient amount to cause at least a 20-fold expansion of CD34+ cells. In an embodiment, the cells are contacted with one or more stem cell expander molecules for a sufficient time and in a sufficient amount to cause at least a 30-fold expansion of CD34+ cells. In an embodiment, the cells are contacted with one or more stem cell expander molecules for a sufficient time and in a sufficient amount to cause at least a 40-fold expansion of CD34+ cells. In an embodiment, the cells are contacted with one or more stem cell expander molecules for a sufficient time and in a sufficient amount to cause at least a 50-fold expansion of CD34+ cells. In an embodiment, the cells are contacted with one or more stem cell expander molecules for a sufficient time and in a sufficient amount to cause at least a 60-fold expansion of CD34+ cells. In embodiments, the cells are contacted with the one or more stem cell expanders for a period of about 1-60 days, e.g., about 1-50 days, e.g., about 1-40 days, e.g., about 1-30 days, e.g., 1-20 days, e.g., about 1-10 days, e.g., about 7 days, e.g., about 1-5 days, e.g., about 2-5 days, e.g., about 2-4 days, e.g., about 2 days or, e.g., about 4 days.

[0585] In embodiments, the cells, e.g., HSPCs, e.g., as described herein, are cultured ex vivo for a period of about 1 hour to about 10 days, e.g., a period of about 12 hours to about 5 days, e.g., a period of about 12 hours to 4 days, e.g., a period of about 1 day to about 4 days, e.g., a period of about 1 day to about 2 days, e.g., a period of about 1 day or a period of about 2 days, prior to the step of contacting the cells with a CRISPR system, e.g., described herein. In embodiments, said culturing prior to said contacting step is in a composition (e.g., a cell culture medium) comprising a stem cell expander, e.g., described herein, e.g., compound 4, e.g., compound 4 at a concentration of about 0.25 uM to about 1 uM, e.g., compound 4 at a concentration of about 0.75-0.5 micromolar. In embodiments, the cells are cultured ex vivo for a period of no more than about about 1 day, e.g., no more than about 18, 17, 16, 15, 14, 13, 12, 11, 10, 9, 8, 7, 6, 5, 4, 3, 2, or 1 hour(s) after the step of contacting the cells with a CRISPR system, e.g., described herein, e.g., in a cell culture medium which comprises a stem cell expander, e.g., described herein, e.g., compound 4, e.g., compound 4 at a concentration of about 0.25 uM to about 1 uM, e.g., compound 4 at a concentration of about 0.75-0.5 micromolar. In other embodiments, the cells are cultured ex vivo for a period of about 1 hour to about 14 days, e.g., a period of about 12 hours to about 10 days, e.g., a period of about 1 day to about 10 days, e.g., a period of about 1 day to about 5 days, e.g., a period of about 1 day to about 4 days, e.g., a period of about 2 days to about 4 days, e.g., a period of about 2 days, about 3 days or about 4 days, after the step of contacting the cells with a CRISPR system, e.g., described herein, in a cell culture medium, e.g., which comprises a stem cell expander, e.g., described herein, e.g., compound 4, e.g., compound 4 at a concentration of about 0.25 uM to about 1 uM, e.g., compound 4 at a concentration of about 0.75-0.5 micromolar.

[0586] In embodiments, the cell culture medium is a chemically defined medium. In embodiments, the cell culture medium may additionally contain, for example, StemSpan SFEM (StemCell Technologies; Cat no. 09650). In embodiments, the cell culture medium may alternatively or additionally contain, for example, HSC Brew, GMP (Miltenyi). In embodiments, the media may be supplemented with thrombopoietin (TPO), human Flt3 ligand (Flt-3L), human stem cell factor (SCF), human interleukin-6, L-glutamine, and/or penicillin/streptomycin. In embodiments, the media is supplemented with thrombopoietin (TPO), human Flt3 ligand (Flt-3L), human stem cell factor (SCF), human interleukin-6, and L-glutamine. In other embodiments, the media is supplemented with thrombopoietin (TPO), human Flt3 ligand (Flt-3L), human stem cell factor (SCF), and human interleukin-6. In other embodiments the media is supplemented with thrombopoietin (TPO), human Flt3 ligand (Flt-3L), and human stem cell factor (SCF), but not human interleukin-6. When present in the medium, the thrombopoietin (TPO), human Flt3 ligand (Flt-3L), human stem cell factor (SCF), human interleukin-6, and/or L-glutamine are each present in a concentration ranging from about 1 ng/mL to about 1000 ng/mL, e.g., a concentration ranging from about 10 ng/mL to about 500 ng/mL, e.g., a concentration ranging from about 10 ng/mL to about 100 ng/mL, e.g., a concentration ranging from about 25 ng/mL to about 75 ng/mL, e.g., a concentration of about 50 ng/mL. In embodiments, each of the supplemented components is at the same concentration. In other embodiments, each of the supplemented components is at a different concentration. In an embodiment, the medium comprises StemSpan SFEM (StemCell Technologies; Cat no. 09650), 50 ng/mL of thrombopoietin (Tpo), 50 ng/mL of human Flt3 ligand (Flt-3L), 50 ng/mL of human stem cell factor (SCF), and 50 ng/mL of human interleukin-6 (IL-6). In an embodiment, the medium comprises StemSpan SFEM (StemCell Technologies; Cat no. 09650), 50 ng/mL of thrombopoietin (Tpo), 50 ng/mL of human Flt3 ligand (Flt-3L), and 50 ng/mL of human stem cell factor (SCF), and does not comprise IL-6. In embodiments, the media further comprises a stem cell expander, e.g., compound 4, e.g., compound 4 at a concentration of 0.75 μM. In embodiments, the media further comprises a stem cell expander, e.g., compound 4, e.g., compound 4 at a concentration of 0.5 μM. In embodiments, the media further comprises 1% L-glutamine and 2% penicillin/streptomycin. In embodiments, the cell culture medium is serum free.

### XII. Combination Therapy

[0587] The present disclosure contemplates the use of the gRNA molecules described herein, or cells (e.g., hematopoietic stem cells, e.g., CD34+ cells) modified with the gRNA molecules described herein, in combination with one or more other therapeutic modalities and/or agents agents. Thus, in addition to the use of the gRNA molecules or cells modified with the gRNA molecules described herein, one may also administer to the subject one or more “standard” therapies for treating hemoglobinopathies.

[0588] The one or more additional therapies for treating hemoglobinopathies may include, for example, additional stem cell transplantation, e.g., hematopoietic stem cell transplantation. The stem cell transplantation may be allogeneic or autologous.

[0589] The one or more additional therapies for treating hemoglobinopathies may include, for example, blood transfusion and/or iron chealation (e.g., removal) therapy. Known iron chealation agents include, for example, deferoxamine and deferasirox.

[0590] The one or more additional therapies for treating hemoglobinopathies may include, for example, folic acid supplements, or hydroxyurea (e.g., 5-hydroxyurea). The one or more additional therapies for treating hemoglobinopathies may be hydroxyurea. In embodiments, the hydroxyurea may be administered at a dose of, for example, 10-35 mg/kg per day, e.g., 10-20 mg/kg per day. In embodiments, the hydroxyurea is adminstered at a dose of 10 mg/kg per day. In embodiments, the hydroxyurea is adminstered at a dose of 10 mg/kg per day. In embodiments, the hydroxyurea is adminstered at a dose of 20 mg/kg per day. In embodiments, the hydroxyurea is administered before and/or after the cell (or population of cells), e.g., CD34+ cell (or population of cells) of the invention, e.g., as described herein.

[0591] The one or more additional therapeutic agents may include, for example, an anti-p-selectin antibody, e.g., SelG1 (Selexys). P-selectin antibodies are described in, for example, PCT publication WO1993/021956, PCT publication WO1995/034324, PCT publication WO2005/100402, PCT publication WO2008/069999, US patent application publication US2011/0293617, U.S. Pat. No. 5,800,815, U.S. Pat. No. 6,667,036, U.S. Pat. No. 8,945,565, U.S. Pat. No. 8,377,440 and U.S. Pat. No. 9,068,001, the contents of each of which are incorporated herein in their entirety.

[0592] The one or more additional agents may include, for example, a small molecule which upregulates fetal hemoglobin. Examples of such molecules include TN1 (e.g., as described in Nam, T. et al., ChemMedChem 2011, 6, 777-780, DOI: 10.1002/cmdc.201000505, herein incorporated by reference).

[0593] The one or more additional therapies may also include irradiation or other bone marrow ablation therapies known in the art. An example of such a therapy is busulfan. Such additional therapy may be performed prior to introduction of the cells of the invention into the subject. In an embodiment the methods of treatment described herein (e.g., the methods of treatment that include administration of cells (e.g., HSPCs) modified by the methods described herein (e.g., modified with a CRISPR system described herein, e.g., to increase HbF production)), the method does not include the step of bone marrow ablation. In embodiments, the methods include a partial bone marrow ablation step.

[0594] The therapies described herein (e.g., comprising administering a population of HSPCs, e.g., HSPCs modified using a CRISPR system described herein) may also be combined with an additional therapeutic agent. In an embodiment, the additional therapeutic agent is an HDAC inhibitor, e.g., panobinostat. In an embodiment, the additional therapeutic is a compound described in PCT Publication No. WO2014/150256, e.g., a compound described in Table 1 of WO2014/150256, e.g., GBT440. Other examples of HDAC inhibitors include, for example, suberoylanilide hydroxamic acid (SAHA). The one or more additional agents may include, for example, a DNA methylation inhibitor. Such agents have been shown to increase the HbF induction in cells having reduced BCL11a activity (e.g., Jian Xu et al, Science 334, 993 (2011); DOI: 0.1126/science.1211053, herein incorporated by reference). Other HDAC inhibitors include any HDAC inhibitor known in the art, for example, trichostatin A, HC toxin, DACI-2, FK228, DACI-14, depudicin, DACI-16, tubacin, NK57, MAZ1536, NK125, Scriptaid, Pyroxamide, MS-275, ITF-2357, MCG-D0103, CRA-024781, CI-994, and LBH589 (see, e.g., Bradner J E, et al., PNAS, 2010 (vol. 107:28), 12617-12622, herein incorporated by reference in its entirety).

[0595] The gRNA molecules described herein, or cells (e.g., hematopoietic stem cells, e.g., CD34+ cells) modified with the gRNA molecules described herein, and the co-therapeutic agent or co-therapy can be administered in the same formulation or separately. In the case of separate administration, the gRNA molecules described herein, or cells modified with the gRNA molecules described herein, can be administered before, after or concurrently with the co-therapeutic or co-therapy. One agent may precede or follow administration of the other agent by intervals ranging from minutes to weeks. In embodiments where two or more different kinds of therapeutic agents are applied separately to a subject, one would generally ensure that a significant period of time did not expire between the time of each delivery, such that these different kinds of agents would still be able to exert an advantageously combined effect on the target tissues or cells.

### XIII. Modified Nucleosides, Nucleotides, and Nucleic Acids

[0596] Modified nucleosides and modified nucleotides can be present in nucleic acids, e.g., particularly gRNA, but also other forms of RNA, e.g., mRNA, RNAi, or siRNA. As described herein “nucleoside” is defined as a compound containing a five-carbon sugar molecule (a pentose or ribose) or derivative thereof, and an organic base, purine or pyrimidine, or a derivative thereof. As described herein, “nucleotide” is defined as a nucleoside further comprising a phosphate group.

[0597] Modified nucleosides and nucleotides can include one or more of:

(i) alteration, e.g., replacement, of one or both of the non-linking phosphate oxygens and/or of one or more of the linking phosphate oxygens in the phosphodiester backbone linkage;
(ii) alteration, e.g., replacement, of a constituent of the ribose sugar, e.g., of the 2′ hydroxyl on the ribose sugar;
(iii) wholesale replacement of the phosphate moiety with “dephospho” linkers;
(iv) modification or replacement of a naturally occurring nucleobase, including with a non-canonical nucleobase;
(v) replacement or modification of the ribose-phosphate backbone;
(vi) modification of the 3′ end or 5′ end of the oligonucleotide, e.g., removal, modification or replacement of a terminal phosphate group or conjugation of a moiety, cap or linker; and
(vii) modification or replacement of the sugar.

[0598] The modifications listed above can be combined to provide modified nucleosides and nucleotides that can have two, three, four, or more modifications. For example, a modified nucleoside or nucleotide can have a modified sugar and a modified nucleobase. In an embodiment, every base of a gRNA is modified, e.g., all bases have a modified phosphate group, e.g., all are phosphorothioate groups. In an embodiment, all, or substantially all, of the phosphate groups of a unimolecular or modular gRNA molecule are replaced with phosphorothioate groups. In embodiments, one or more of the five 3′-terminal bases and/or one or more of the five 5′-terminal bases of the gRNA are modified with a phosphorothioate group.

[0599] In an embodiment, modified nucleotides, e.g., nucleotides having modifications as described herein, can be incorporated into a nucleic acid, e.g., a “modified nucleic acid.” In some embodiments, the modified nucleic acids comprise one, two, three or more modified nucleotides. In some embodiments, at least 5% (e.g., at least about 5%, at least about 10%, at least about 15%, at least about 20%, at least about 25%, at least about 30%, at least about 35%, at least about 40%, at least about 45%, at least about 50%, at least about 55%, at least about 60%, at least about 65%, at least about 70%, at least about 75%, at least about 80%, at least about 85%, at least about 90%, at least about 95%, or about 100%) of the positions in a modified nucleic acid are a modified nucleotides.

[0600] Unmodified nucleic acids can be prone to degradation by, e.g., cellular nucleases. For example, nucleases can hydrolyze nucleic acid phosphodiester bonds. Accordingly, in one aspect the modified nucleic acids described herein can contain one or more modified nucleosides or nucleotides, e.g., to introduce stability toward nucleases.

[0601] In some embodiments, the modified nucleosides, modified nucleotides, and modified nucleic acids described herein can exhibit a reduced innate immune response when introduced into a population of cells, both in vivo and ex vivo. The term “innate immune response” includes a cellular response to exogenous nucleic acids, including single stranded nucleic acids, generally of viral or bacterial origin, which involves the induction of cytokine expression and release, particularly the interferons, and cell death. In some embodiments, the modified nucleosides, modified nucleotides, and modified nucleic acids described herein can disrupt binding of a major groove interacting partner with the nucleic acid.

[0602] In some embodiments, the modified nucleosides, modified nucleotides, and modified nucleic acids described herein can exhibit a reduced innate immune response when introduced into a population of cells, both in vivo and ex vivo, and also disrupt binding of a major groove interacting partner with the nucleic acid.

### Definitions of Chemical Groups

[0603] As used herein, “alkyl” is meant to refer to a saturated hydrocarbon group which is straight-chained or branched. Example alkyl groups include methyl (Me), ethyl (Et), propyl (e.g., n-propyl and isopropyl), butyl (e.g., n-butyl, isobutyl, t-butyl), pentyl (e.g., n-pentyl, isopentyl, neopentyl), and the like. An alkyl group can contain from 1 to about 20, from 2 to about 20, from 1 to about 12, from 1 to about 8, from 1 to about 6, from 1 to about 4, or from 1 to about 3 carbon atoms.

[0604] As used herein, “aryl” refers to monocyclic or polycyclic (e.g., having 2, 3 or 4 fused rings) aromatic hydrocarbons such as, for example, phenyl, naphthyl, anthracenyl, phenanthrenyl, indanyl, indenyl, and the like. In some embodiments, aryl groups have from 6 to about 20 carbon atoms.

[0605] As used herein, “alkenyl” refers to an aliphatic group containing at least one double bond. As used herein, “alkynyl” refers to a straight or branched hydrocarbon chain containing 2-12 carbon atoms and characterized in having one or more triple bonds. Examples of alkynyl groups include, but are not limited to, ethynyl, propargyl, and 3-hexynyl.

[0606] As used herein, “arylalkyl” or “aralkyl” refers to an alkyl moiety in which an alkyl hydrogen atom is replaced by an aryl group. Aralkyl includes groups in which more than one hydrogen atom has been replaced by an aryl group. Examples of “arylalkyl” or “aralkyl” include benzyl, 2-phenylethyl, 3-phenylpropyl, 9-fluorenyl, benzhydryl, and trityl groups.

[0607] As used herein, “cycloalkyl” refers to a cyclic, bicyclic, tricyclic, or polycyclic non-aromatic hydrocarbon groups having 3 to 12 carbons. Examples of cycloalkyl moieties include, but are not limited to, cyclopropyl, cyclopentyl, and cyclohexyl.

[0608] As used herein, “heterocyclyl” refers to a monovalent radical of a heterocyclic ring system. Representative heterocyclyls include, without limitation, tetrahydrofuranyl, tetrahydrothienyl, pyrrolidinyl, pyrrolidonyl, piperidinyl, pyrrolinyl, piperazinyl, dioxanyl, dioxolanyl, diazepinyl, oxazepinyl, thiazepinyl, and morpholinyl.

[0609] As used herein, “heteroaryl” refers to a monovalent radical of a heteroaromatic ring system. Examples of heteroaryl moieties include, but are not limited to, imidazolyl, oxazolyl, thiazolyl, triazolyl, pyrrolyl, furanyl, indolyl, thiophenyl pyrazolyl, pyridinyl, pyrazinyl, pyridazinyl, pyrimidinyl, indolizinyl, purinyl, naphthyridinyl, quinolyl, and pteridinyl.

### Phosphate Backbone Modifications

### The Phosphate Group

[0610] In some embodiments, the phosphate group of a modified nucleotide can be modified by replacing one or more of the oxygens with a different substituent. Further, the modified nucleotide, e.g., modified nucleotide present in a modified nucleic acid, can include the wholesale replacement of an unmodified phosphate moiety with a modified phosphate as described herein. In some embodiments, the modification of the phosphate backbone can include alterations that result in either an uncharged linker or a charged linker with unsymmetrical charge distribution.

[0611] Examples of modified phosphate groups include, phosphorothioate, phosphoroselenates, borano phosphates, borano phosphate esters, hydrogen phosphonates, phosphoroamidates, alkyl or aryl phosphonates and phosphotriesters. In some embodiments, one of the non-bridging phosphate oxygen atoms in the phosphate backbone moiety can be replaced by any of the following groups: sulfur (S), selenium (Se), BR₃ (wherein R can be, e.g., hydrogen, alkyl, or aryl), C (e.g., an alkyl group, an aryl group, and the like), H, NR₂ (wherein R can be, e.g., hydrogen, alkyl, or aryl), or OR (wherein R can be, e.g., alkyl or aryl). The phosphorous atom in an unmodified phosphate group is achiral. However, replacement of one of the non-bridging oxygens with one of the above atoms or groups of atoms can render the phosphorous atom chiral; that is to say that a phosphorous atom in a phosphate group modified in this way is a stereogenic center. The stereogenic phosphorous atom can possess either the “R” configuration (herein Rp) or the “S” configuration (herein Sp).

[0612] Phosphorodithioates have both non-bridging oxygens replaced by sulfur. The phosphorus center in the phosphorodithioates is achiral which precludes the formation of oligoribonucleotide diastereomers. In some embodiments, modifications to one or both non-bridging oxygens can also include the replacement of the non-bridging oxygens with a group independently selected from S, Se, B, C, H, N, and OR (R can be, e.g., alkyl or aryl).

[0613] The phosphate linker can also be modified by replacement of a bridging oxygen, (i.e., the oxygen that links the phosphate to the nucleoside), with nitrogen (bridged phosphoroamidates), sulfur (bridged phosphorothioates) and carbon (bridged methylenephosphonates). The replacement can occur at either linking oxygen or at both of the linking oxygens.

### Replacement of the Phosphate Group

[0614] The phosphate group can be replaced by non-phosphorus containing connectors. In some embodiments, the charge phosphate group can be replaced by a neutral moiety.

[0615] Examples of moieties which can replace the phosphate group can include, without limitation, e.g., methyl phosphonate, hydroxylamino, siloxane, carbonate, carboxymethyl, carbamate, amide, thioether, ethylene oxide linker, sulfonate, sulfonamide, thioformacetal, formacetal, oxime, methyleneimino, methylenemethylimino, methylenehydrazo, methylenedimethylhydrazo and methyleneoxymethylimino.

### Replacement of the Ribophosphate Backbone

[0616] Scaffolds that can mimic nucleic acids can also be constructed wherein the phosphate linker and ribose sugar are replaced by nuclease resistant nucleoside or nucleotide surrogates. In some embodiments, the nucleobases can be tethered by a surrogate backbone. Examples can include, without limitation, the morpholino, cyclobutyl, pyrrolidine and peptide nucleic acid (PNA) nucleoside surrogates.

### Sugar Modifications

[0617] The modified nucleosides and modified nucleotides can include one or more modifications to the sugar group. For example, the 2′ hydroxyl group (OH) can be modified or replaced with a number of different “oxy” or “deoxy” substituents. In some embodiments, modifications to the 2′ hydroxyl group can enhance the stability of the nucleic acid since the hydroxyl can no longer be deprotonated to form a 2′-alkoxide ion. The 2′-alkoxide can catalyze degradation by intramolecular nucleophilic attack on the linker phosphorus atom.

[0618] Examples of “oxy”-2′ hydroxyl group modifications can include alkoxy or aryloxy (OR, wherein “R” can be, e.g., alkyl, cycloalkyl, aryl, aralkyl, heteroaryl or a sugar); polyethyleneglycols (PEG), 0(CH₂CH₂0)ₙCH2CH₂OR wherein R can be, e.g., H or optionally substituted alkyl, and n can be an integer from 0 to 20 (e.g., from 0 to 4, from 0 to 8, from 0 to 10, from 0 to 16, from 1 to 4, from 1 to 8, from 1 to 10, from 1 to 16, from 1 to 20, from 2 to 4, from 2 to 8, from 2 to 10, from 2 to 16, from 2 to 20, from 4 to 8, from 4 to 10, from 4 to 16, and from 4 to 20). In some embodiments, the “oxy”-2′ hydroxyl group modification can include “locked” nucleic acids (LNA) in which the 2′ hydroxyl can be connected, e.g., by a Ci-₆ alkylene or Cj-6 heteroalkylene bridge, to the 4′ carbon of the same ribose sugar, where exemplary bridges can include methylene, propylene, ether, or amino bridges; O-amino (wherein amino can be, e.g., NH₂; alkylamino, dialkylamino, heterocyclyl, arylamino, diarylamino, heteroarylamino, or diheteroarylamino, ethylenediamine, or polyamino) and aminoalkoxy, 0(CH₂)ₙ-amino, (wherein amino can be, e.g., NH₂; alkylamino, dialkylamino, heterocyclyl, arylamino, diarylamino, heteroarylamino, or diheteroarylamino, ethylenediamine, or polyamino). In some embodiments, the “oxy”-2′ hydroxyl group modification can include the methoxyethyl group (MOE), (OCH₂CH₂OCH₃, e.g., a PEG derivative).

[0619] “Deoxy” modifications can include hydrogen (i.e. deoxyribose sugars, e.g., at the overhang portions of partially ds RNA); halo (e.g., bromo, chloro, fluoro, or iodo); amino (wherein amino can be, e.g., NH₂; alkylamino, dialkylamino, heterocyclyl, arylamino, diarylamino, heteroarylamino, diheteroarylamino, or amino acid); NH(CH₂CH₂NH)ₙCH2CH₂— amino (wherein amino can be, e.g., as described herein), —NHC(0)R (wherein R can be, e.g., alkyl, cycloalkyl, aryl, aralkyl, heteroaryl or sugar), cyano; mercapto; alkyl-thio-alkyl; thioalkoxy; and alkyl, cycloalkyl, aryl, alkenyl and alkynyl, which may be optionally substituted with e.g., an amino as described herein.

[0620] The sugar group can also contain one or more carbons that possess the opposite stereochemical configuration than that of the corresponding carbon in ribose. Thus, a modified nucleic acid can include nucleotides containing e.g., arabinose, as the sugar. The nucleotide “monomer” can have an alpha linkage at the F position on the sugar, e.g., alpha-nucleosides. The modified nucleic acids can also include “abasic” sugars, which lack a nucleobase at C—. These abasic sugars can also be further modified at one or more of the constituent sugar atoms. The modified nucleic acids can also include one or more sugars that are in the L form, e.g. L-nucleosides.

[0621] Generally, RNA includes the sugar group ribose, which is a 5-membered ring having an oxygen. Exemplary modified nucleosides and modified nucleotides can include, without limitation, replacement of the oxygen in ribose (e.g., with sulfur (S), selenium (Se), or alkylene, such as, e.g., methylene or ethylene); addition of a double bond (e.g., to replace ribose with cyclopentenyl or cyclohexenyl); ring contraction of ribose (e.g., to form a 4-membered ring of cyclobutane or oxetane); ring expansion of ribose (e.g., to form a 6- or 7-membered ring having an additional carbon or heteroatom, such as for example, anhydrohexitol, altritol, mannitol, cyclohexanyl, cyclohexenyl, and morpholino that also has a phosphoramidate backbone). In some embodiments, the modified nucleotides can include multicyclic forms (e.g., tricyclo; and “unlocked” forms, such as glycol nucleic acid (GNA) (e.g., R-GNA or S-GNA, where ribose is replaced by glycol units attached to phosphodiester bonds), threose nucleic acid (TNA, where ribose is replaced with a-L-threofuranosyl-(3′-→2′)).

[0622] Modifications on the Nucleobase

[0623] The modified nucleosides and modified nucleotides described herein, which can be incorporated into a modified nucleic acid, can include a modified nucleobase. Examples of nucleobases include, but are not limited to, adenine (A), guanine (G), cytosine (C), and uracil (U). These nucleobases can be modified or wholly replaced to provide modified nucleosides and modified nucleotides that can be incorporated into modified nucleic acids. The nucleobase of the nucleotide can be independently selected from a purine, a pyrimidine, a purine or pyrimidine analog. In some embodiments, the nucleobase can include, for example, naturally-occurring and synthetic derivatives of a base.

[0624] Uracil

[0625] In some embodiments, the modified nucleobase is a modified uracil. Exemplary nucleobases and nucleosides having a modified uracil include without limitation pseudouridine (ψ), pyridin-4-one ribonucleoside, 5-aza-uridine, 6-aza-uridine, 2-thio-5-aza-uridine, 2-thio-uridine (s2U), 4-thio-uridine (s4U), 4-thio-pseudouridine, 2-thio-pseudouridine, 5-hydroxy-u,ridine (ho⁵U), 5-aminoallyl-uridine, 5-halo-uridine (e.g., 5-iodo-uridine or 5-bromo-uridine), 3-methyl-uridine (m³U), 5-methoxy-uridine (mo⁵U), uridine 5-oxyacetic acid (cmo⁵U), uridine 5-oxyacetic acid methyl ester (mcmôU), 5-carboxymethyl-uridine (cm^{s}U), 1-carboxymethyl-pseudouridine, 5-carboxyhydroxymethyl-uridine (chm⁵U), 5-carboxyhydroxymethyl-uridine methyl ester (mchm⁵U), 5-methoxycarbonylmethyl-uridine (mcm⁵U), 5-methoxycarbonylmethyl-2-thio-uridine (mcm⁵s2U), 5-aminomethyl-2-thio-uridine (nm⁵s2U), 5-methylaminomethyl-uridine (mnm⁵U), 5-methylaminomethyl-2-thio-uridine (mnm⁵s2U), 5-methylaminomethyl-2-seleno-uridine (mnm⁵se²U), 5-carbamoylmethyl-uridine (ncm⁵U), 5-carboxymethylaminomethyl-uridine (cmnm⁵U), 5-carboxymethylaminomethyl-2-thio-uridine (cmnm \s2U), 5-propynyl-uridine, 1-propynyl-pseudouridine, 5-taurinomethyl-uridine (xcm⁵U), 1-taurinomethyl-pseudouridine, 5-taurinomethyl-2-thio-uridine(Trn⁵s2U), 1-taurinomethyl-4-thio-pseudouridine, 5-methyl-uridine (m⁵U, i.e., having the nucleobase deoxythymine), 1-methyl-pseudouridine (ιτι′ψ). 5-methyl-2-thio-uridine (m⁵s2U), l-methyl-4-thio-pseudouridine (m's \|/), 4-thio-1-methyl-pseudouridine, 3-methyl-pseudouridine (m′V), 2-thio-1-methyl-pseudouridine, 1-methyl-1-deaza-pseudouridine, 2-thio-1-methyl-1-deaza-pseudouridine, dihydroundine (D), dihydropseudoundine, 5,6-dihydrouridine, 5-methyl-dihydrouridine (m⁵D), 2-thio-dihydrouridine, 2-thio-dihydropseudouridine, 2-methoxy-uridine, 2-methoxy-4-thio-uridine, 4-methoxy-pseudouridine, 4-methoxy-2-thio-pseudouridine, N1-methyl-pseudouridine, 3-(3-amino-3-carboxypropyl)uridine (acp³U), 1-methyl-3-(3-amino-3-carboxypropy pseudouridine 5-(isopentenylaminomethyl)uridine (inm⁵U), 5-(isopentenylaminomethyp-2-thio-uridine (inm⁵s2U), a-thio-uridine, 2′-0-methyl-uridine (Urn), 5,2′-0-dimethyl-uridine (m⁵Um), 2′-0-methyl-pseudouridine (ψπι), 2-thio-2′-0-methyl-uridine (s2Um), 5-methoxycarbonylmethyl-2′-0-methyl-uridine (mcm ⁵Um), 5-carbamoylmethyl-2′-0-methyl-uridine (ncm ⁵Um), 5-carboxymethylaminomethyl-2′-0-methyl-uridine (cmnm ⁵Um), 3,2′-0-dimethyl-uridine (m³Um), 5-(isopentenylaminomethyl)-2′-0-methyl-uridine (inm⁵Um), 1-thio-uridine, deoxythymidine, 2′-F-ara-uridine, 2′-F-uridine, 2′-OH-ara-uridine, 5-(2-carbomethoxyvinyl) uridine, 5-[3-(1-E-propenylamino)uridine, pyrazolo[3,4-d]pyrimidines, xanthine, and hypoxanthine.

### Cytosine

[0626] In some embodiments, the modified nucleobase is a modified cytosine. Exemplary nucleobases and nucleosides having a modified cytosine include without limitation 5-aza-cytidine, 6-aza-cytidine, pseudoisocytidine, 3-methyl-cytidine (m³C), N4-acetyl-cytidine (act), 5-formyl-cytidine (f⁵C), N4-methyl-cytidine (m⁴C), 5-methyl-cytidine (m⁵C), 5-halo-cytidine (e.g., 5-iodo-cytidine), 5-hydroxymethyl-cytidine (hm⁵C), 1-methyl-pseudoisocytidine, pyrrolo-cytidine, pyrrolo-pseudoisocytidine, 2-thio-cytidine (s2C), 2-thio-5-methyl-cytidine, 4-thio-pseudoisocytidine, 4-thio-1-methyl-pseudoisocytidine, 4-thio-1-methyl-1-deaza-pseudoisocytidine, 1-methyl-1-deaza-pseudoisocytidine, zebularine, 5-aza-zebularine, 5-methyl-zebularine, 5-aza-2-thio-zebularine, 2-thio-zebularine, 2-methoxy-cytidine, 2-methoxy-5-methyl-cytidine, 4-methoxy-pseudoisocytidine, 4-methoxy-1-methyl-pseudoisocytidine, lysidine (k²C), a-thio-cytidine, 2′-0-methyl-cytidine (Cm), 5,2′-0-dimethyl-cytidine (m⁵Cm), N4-acetyl-2′-0-methyl-cytidine (ac⁴Cm), N4,2′-0-dimethyl-cytidine (m⁴Cm), 5-formyl-2′-0-methyl-cytidine (f ⁵Cm), N4,N4,2′-0-trimethyl-cytidine (m⁴₂Cm), 1-thio-cytidine, 2′-F-ara-cytidine, 2′-F-cytidine, and 2′-OH-ara-cytidine.

### Adenine

[0627] In some embodiments, the modified nucleobase is a modified adenine. Exemplary nucleobases and nucleosides having a modified adenine include without limitation 2-amino-purine, 2,6-diaminopurine, 2-amino-6-halo-purine (e.g., 2-amino-6-chloro-purine), 6-halo-purine (e.g., 6-chloi-purine), 2-amino-6-methyl-purine, 8-azido-adenosine, 7-deaza-adenine, 7-deaza-8-aza-adenine, 7-deaza-2-amino-purine, 7-deaza-8-aza-2-amino-purine, 7-deaza-2,6-diaminopurine, 7-deaza-8-aza-2,6-diaminopurine, 1-methyl-adenosine (m′A), 2-methyl-adenine (m A), N6-methyl-adenosine (m⁶A), 2-methylthio-N6-methyl-adenosine (ms2 m⁶A), N6-isopentenyl-adenosine 2-methylthio-N6-isopentenyl-adenosine (ms²i⁶A), N6-(cis-hydroxyisopentenyl)adenosine (io⁶A), 2-methylthio-N6-(cis-hydroxyisopentenyl)adenosine (ms2io⁶A), N6-glycinylcarbamoyl-adenosine (g⁶A), N6-threonylcarbamoyl-adenosine (t⁶A), N6-methyl-N6-threonylcarbamoyl-adenosine (m⁶t⁶A), 2-methylthio-N6-threonylcarbamoyl-adenosine (ms²g⁶A), N6,N6-dimethyl-adenosine (m⁶₂A), N6-hydroxynorvalylcarbamoyl-adenosine (hn⁶A), 2-methylthio-N6-hydroxynorvalylcarbamoyl-adenosine (ms2hn⁶A), N6-acetyl-adenosine (ac⁶A), 7-methyl-adenine, 2-methylthio-adenine, 2-methoxy-adenine, a-thio-adenosine, 2′-0-methyl-adenosine (Am), N⁶,2′-0-dimethyl-adenosine (m⁵Am), N⁶-Methyl-2′-deoxyadenosine, N6,N6,2′-0-trimethyl-adenosine (m⁶₂Am), 1,2′-0-dimethyl-adenosine (m′ Am), 2′-0-ribosyladenosine (phosphate) (Ar(p)), 2-amino-N6-methyl-purine, 1-thio-adenosine, 8-azido-adenosine, 2′-F-ara-adenosine, 2′-F-adenosine, 2′-OH-ara-adenosine, and N6-(19-amino-pentaoxanonadecyl)-adenosine.

### Guanine

[0628] In some embodiments, the modified nucleobase is a modified guanine. Exemplary nucleobases and nucleosides having a modified guanine include without limitation inosine (I), 1-methyl-inosine (m′l), wyosine (imG), methylwyosine (mimG), 4-demethyl-wyo″sine (imG-14), isowyosine (imG2), wybutosine (yW), peroxywybutosine (o₂yW), hydroxywybutosine (OHyW), undemriodified hydroxywybutosine (OHyW*), 7-deaza-guanosine, queuosine (Q), epoxyqueuosine (oQ), galactosyl-queuosine (galQ), mannosyl-queuosine (manQ), 7-cyano-7-deaza-guanosine (preQ₀), 7-aminomethyl-7-deaza-guanosine (preQi), archaeosine (G⁺), 7-deaza-8-aza-guanosine, 6-thio-guanosine, 6-thio-7-deaza-guanosine, 6-thio-7-deaza-8-aza-guanosine, 7-methyl-guanosine (m⁷G), 6-thio-7-methyl-guanosine, 7-methyl-inosine, 6-methoxy-guanosine, 1-methyl-guanosine (m′G), N2-methyl-guanosine (m²G), N2,N2-dimethyl-guanosine (m²₂G), N2,7-dimethyl-guanosine (m²,7G), N2, N2,7-dimethyl-guanosine (m²,2,7G), 8-oxo-guanosine, 7-methyl-8-oxo-guanosine, 1-meth thio-guanosine, N2-methyl-6-thio-guanosine, N2,N2-dimethyl-6-thio-guanosine, a-thio-guanosine, 2′-0-methyl-guanosine (Gm), N2-methyl-2′-0-methyl-guanosine (m¾m), N2,N2-dimethyl-2′-0-methyl-guanosine (m²₂Gm), 1-methyl-2′-0-methyl-guanosine (m′Gm), N2,7-dimethyl-2′-0-methyl-guanosine (m²,7Gm), 2′-0-methyl-inosine (Im), 1,2′-0-dimethyl-inosine (m′lm), 0⁶-phenyl-2′-deoxyinosine, 2′-0-ribosylguanosine (phosphate) (Gr(p)), 1-thio-guanosine, 0⁶-methy]-guanosine, 0⁶-Methyl-2′-deoxyguanosine, 2′-F-ara-guanosine, and 2′-F-guanosine.

Modified gRNAs

[0629] In some embodiments, the modified nucleic acids can be modified gRNAs. In some embodiments, gRNAs can be modified at the 3′ end. In this embodiment, the gRNAs can be modified at the 3′ terminal U ribose. For example, the two terminal hydroxyl groups of the U ribose can be oxidized to aldehyde groups and a concomitant opening of the ribose ring to afford a modified nucleoside, wherein U can be an unmodified or modified uridine.

[0630] In another embodiment, the 3′ terminal U can be modified with a 2′ 3′ cyclic phosphate, wherein U can be an unmodified or modified uridine. In some embodiments, the gRNA molecules may contain 3′ nucleotides which can be stabilized against degradation, e.g., by incorporating one or more of the modified nucleotides described herein. In this embodiment, e.g., uridines can be replaced with modified uridines, e.g., 5-(2-amino)propyl uridine, and 5-bromo uridine, or with any of the modified uridines described herein; adenosines and guanosines can be replaced with modified adenosines and guanosines, e.g., with modifications at the 8-position, e.g., 8-bromo guanosine, or with any of the modified adenosines or guanosines described herein. In some embodiments, deaza nucleotides, e.g., 7-deaza-adenosine, can be incorporated into the gRNA. In some embodiments, O- and N-alkylated nucleotides, e.g., N6-methyl andenosine, can be incorporated into the gRNA. In some embodiments, sugar-modified ribonucleotides can be incorporated, e.g., wherein the 2′ OH— group is replaced by a group selected from H, —OR, —R (wherein R can be, e.g., methyl, alkyl, cycloalkyl, aryl, aralkyl, heteroaryl or sugar), halo, —SH, —SR (wherein R can be, e.g., alkyl, cycloalkyl, aryl, aralkyl, heteroaryl or sugar), amino (wherein amino can be, e.g., NH₂; alkylamino, dialkylamino, heterocyclyl, arylamino, diarylamino, heteroarylamino, diheteroarylamino, or amino acid); or cyano (—CN). In some embodiments, the phosphate backbone can be modified as described herein, e.g., with a phosphothioate group. In some embodiments, the nucleotides in the overhang region of the gRNA can each independently be a modified or unmodified nucleotide including, but not limited to 2′-sugar modified, such as, 2-F 2′-0-methyl, thymidine (T), 2′-O-methoxyethyl-5-methyluridine (Teo), 2′-O-methoxyethyladenosine (Aeo), 2′-O-methoxyethyl-5-methylcytidine (m5Ceo), and any combinations thereof.

[0631] In an embodiment, a one or more or all of the nucleotides in single stranded overhang of an RNA molecule, e.g., a gRNA molecule, are deoxynucleotides.

### Pharmaceutical Compositions

[0632] Pharmaceutical compositions of the present invention may comprise a gRNA molecule described herein, e.g., a plurality of gRNA molecules as described herein, or a cell (e.g., a population of cells, e.g., a population of hematopoietic stem cells, e.g., of CD34+ cells) comprising one or more cells modified with one or more gRNA molecules described herein, in combination with one or more pharmaceutically or physiologically acceptable carriers, diluents or excipients. Such compositions may comprise buffers such as neutral buffered saline, phosphate buffered saline and the like; carbohydrates such as glucose, mannose, sucrose or dextrans, mannitol; proteins; polypeptides or amino acids such as glycine; antioxidants; chelating agents such as EDTA or glutathione; adjuvants (e.g., aluminum hydroxide); and preservatives. Compositions of the present invention are in one aspect formulated for intravenous administration.

[0633] Pharmaceutical compositions of the present invention may be administered in a manner appropriate to the disease to be treated (or prevented). The quantity and frequency of administration will be determined by such factors as the condition of the patient, and the type and severity of the patient's disease, although appropriate dosages may be determined by clinical trials.

[0634] In one embodiment, the pharmaceutical composition is substantially free of, e.g., there are no detectable levels of a contaminant, e.g., selected from the group consisting of endotoxin, mycoplasma, mouse antibodies, pooled human serum, bovine serum albumin, bovine serum, culture media components, unwanted CRISPR system components, a bacterium and a fungus. In one embodiment, the bacterium is at least one selected from the group consisting of Alcaligenes faecalis, Candida albicans, Escherichia coli, Haemophilus influenza, Neisseria meningitides, Pseudomonas aeruginosa, Staphylococcus aureus, Streptococcus pneumonia, and Streptococcus pyogenes group A.

[0635] The administration of the subject compositions may be carried out in any convenient manner, including by aerosol inhalation, injection, ingestion, transfusion, implantation or transplantation. The compositions described herein may be administered to a patient transarterially, subcutaneously, intradermally, intratumorally, intranodally, intramedullary, intramuscularly, by intravenous (i.v.) injection, or intraperitoneally. In one aspect, the compositions of the present invention are administered to a patient by intradermal or subcutaneous injection. In one aspect, the cell compositions of the present invention are administered by i.v. injection.

[0636] The dosage of the above treatments to be administered to a patient will vary with the precise nature of the condition being treated and the recipient of the treatment. The scaling of dosages for human administration can be performed according to art-accepted practices.

### Cells

[0637] The invention also relates to cells comprising a gRNA molecule of the invention, or nucleic acid encoding said gRNA molecules.

[0638] In an aspect the cells are cells made by a process described herein.

[0639] In embodiments, the cells are hematopoietic stem cells (e.g., hematopoietic stem and progenitor cells; HSPCs), for example, CD34+ stem cells. In embodiments, the cells are CD34+/CD90+ stem cells. In embodiments, the cells are CD34+/CD90− stem cells. In embodiments, the cells are human hematopoietic stem cells. In embodiments, the cells are autologous. In embodiments, the cells are allogeneic.

[0640] In embodiments, the cells are derived from bone marrow, e.g., autologous bone marrow. In embodiments, the cells are derived from peripheral blood, e.g., mobilized peripheral blood, e.g., autologous mobilized peripheral blood. In embodiments employing moblized peripheral blood, the cells are isoalted from patients who have been administered a mobilization agent. In embodiments, the mobilization agent is G-CSF. In embodiments, the mobilization agent is Plerixafor® (AMD3100). In embodiments, the cells are derived from umbilical cord blood, e.g., allogeneic umbilical cord blood.

[0641] In embodiments, the cells are mammalian. In embodiments, the cells are human.

[0642] In an aspect, the invention provides a cell comprising a modification or alteration, e.g., an indel, at or near (e.g., within 20, 19, 18, 17, 16, 15, 14, 13, 12, 11, 10, 9, 8, 7, 6, 5, 4, 3, 2 or 1 nucleotides of) a nucleic acid sequence having complementarity to a gRNA molecule or gRNA molecules, e.g., as described herein, introduced into said cells, e.g., as part of a CRISPR system as described herein. In embodiments, the cell is a CD34+ cell. In embodiments, the altered or modified cell, e.g., CD34+ cell, maintains the ability to differentiate into cells of multiple lineages, e.g., maintains the ability to differentiate into cells of the erythroid lineage. In embodiments, the altered or modified cell, e.g., CD34+ cell, has undergone or is able to undergo at least 2, at least 3, at least 4, at least 5, at least 6, at least 7, at least 8, at least 9 or at least 10 or more doublings in culture, e.g., in culture comprising a stem cell expander, e.g., Compound 4. In embodiments, the altered or modified cell, e.g., CD34+ cell, has undergone or is able to undergo at least 5, e.g., about 5, doublings in culture, e.g., in culture comprising a stem cell expander molecule, e.g., as described herein, e.g., Compound 4. In embodiments the altered or modified cell, e.g., CD34+ cell, exhibits and/or is able to differentiate into a cell, e.g., into a cell of the erythroid lineage, e.g., into a red blood cell, that exhibits increased fetal hemoglobin level (e.g., expression level and/or protein level), e.g., at least a 20% increase in fetal hemoglobin protein level, relative to a similar unmodified or unaltered cell. In embodiments the altered or modified cell, e.g., CD34+ cell, exhibits and/or is able to differentiate into a cell, e.g., into a cell of the erythroid lineage, e.g., into a red blood cell, that exhibits increased fetal hemoglobin level (e.g., expression level and/or protein level), relative to a similar unmodified or unaltered cell, e.g., produces at least 6 picograms, e.g., at least 7 picograms, at least 8 picograms, at least 9 picograms, or at least 10 picograms of fetal hemoglobin. In embodiments the altered or modified cell, e.g., CD34+ cell, exhibits and/or is able to differentiate into a cell, e.g., into a cell of the erythroid lineage, e.g., into a red blood cell, that exhibits increased fetal hemoglobin level (e.g., expression level and/or protein level), relative to a similar unmodified or unaltered cell, e.g., produces about 6 to about 12, about about 6 to about 7, about 7 to about 8, about 8 to about 9, about 9 to about 10, about 10 to about 11 or about 11 to about 12 picograms of fetal hemoglobin.

[0643] In an aspect, the invention provides a population of cells comprising cells having a modification or alteration, e.g., an indel, at or near (e.g., within 20, 19, 18, 17, 16, 15, 14, 13, 12, 11, 10, 9, 8, 7, 6, 5, 4, 3, 2 or 1 nucleotides of) a nucleic acid sequence having complementarity to a gRNA molecule or gRNA molecules, e.g., as described herein, introduced into said cells, e.g., as part of a CRISPR system as described herein. In embodiments, at least 50%, e.g., at least 60%, at least 70%, at least 80% or at least 90% of the cells of the population have the modification or alteration (e.g., have at least one modification or alteration), e.g., as measured by NGS, e.g., as described herein, e.g., at day two following introduction of the gRNA and/or CRISPR system of the invention. In embodiments, at least 90%, e.g., at least 91%, at least 92%, at least 93%, at least 94%, at least 95%, at least 96%, at least 97%, at least 98% or at least 99% of the cells of the population have the modification or alteration (e.g., have at least one modification or alteration), e.g., as measured by NGS, e.g., as described herein, e.g., at day two following introduction of the gRNA and/or CRISPR system of the invention. In embodiments, the population of cells comprise CD34+ cells, e.g., comprise at least about 50%, at least about 60%, at least about 70%, at least about 80%, at least about 90%, at least about 95% or at least about 98% CD34+ cells. In embodiments, the population of cells comprising the altered or modified cells, e.g., CD34+ cells, maintain the ability to produce, e.g., differentiate into, cells of multiple lineages, e.g., maintains the ability to produce, e.g., differentiate into, cells of the erythroid lineage. In embodiments, the population of cells, e.g., population of CD34+ cells, has undergone or is able to undergo at least 2, at least 3, at least 4, at least 5, at least 6, at least 7, at least 8, at least 9 or at least 10 or more population doublings in culture, e.g., in culture comprising a stem cell expander, e.g., Compound 4. In embodiments, the population of altered or modified cells, e.g., population of CD34+ cells, has undergone or is capable of undergoing at least 5, e.g., about 5, population doublings in culture, e.g., in culture comprising a stem cell expander molecule, e.g., as described herein, e.g., Compound 4. In embodiments the population of cells comprising altered or modified cells, e.g., CD34+ cells, exhibits and/or is able to differentiate into a population of cells, e.g., into a population of cells of the erythroid lineage, e.g., into a population of red blood cells, that exhibits increased fetal hemoglobin level (e.g., expression level and/or protein level), e.g., at least a 20% increase in fetal hemoglobin protein level, relative to a similar unmodified or unaltered cells. In embodiments the population of cells comprising altered or modified cells, e.g., CD34+ cells, exhibits and/or is able to differentiate into a population of cells, e.g., into a population of cells of the erythroid lineage, e.g., into a population of red blood cells, that exhibits increased fetal hemoglobin level (e.g., expression level and/or protein level), relative to a similar unmodified or unaltered cells, e.g., comprises cells that produce at least 6 picograms, e.g., at least 7 picograms, at least 8 picograms, at least 9 picograms, or at least 10 picograms of fetal hemoglobin per cell. In embodiments the population of altered or modified cells, e.g., CD34+ cells, exhibits and/or is able to differentiate into a population of cells, e.g., into a population of cells of the erythroid lineage, e.g., into a population of red blood cells, that exhibits increased fetal hemoglobin level (e.g., expression level and/or protein level), relative to a similar unmodified or unaltered cell, e.g., comprises cells that produce about 6 to about 12, about about 6 to about 7, about 7 to about 8, about 8 to about 9, about 9 to about 10, about 10 to about 11 or about 11 to about 12 picograms of fetal hemoglobin per cell.

[0644] In embodiments, the population of cells, e.g., as described herein, comprises at least about 1e3 cells.

[0645] In embodiments, the population of cells, e.g., as described herein, comprises at least about 1e4 cells.

[0646] In embodiments, the population of cells, e.g., as described herein, comprises at least about 1e5 cells.

[0647] In embodiments, the population of cells, e.g., as described herein, comprises at least about 1e6 cells.

[0648] In embodiments, the population of cells, e.g., as described herein, comprises at least about 1e7 cells.

[0649] In embodiments, the population of cells, e.g., as described herein, comprises at least about 1e8 cells.

[0650] In embodiments, the population of cells, e.g., as described herein, comprises at least about 1e9 cells.

[0651] In embodiments, the population of cells, e.g., as described herein, comprises at least about 1e10 cells.

[0652] In embodiments, the population of cells, e.g., as described herein, comprises at least about 1e11 cells.

[0653] In embodiments, the population of cells, e.g., as described herein, comprises at least about 1e12 cells.

[0654] In embodiments, the population of cells, e.g., as described herein, comprises at least about 1e13 cells per kilogram body weight of the patient to which they are to be administered. In embodiments, the population of cells, e.g., as described herein, comprises at least about 1e6 cells per kilogram body weight of the patient to which they are to be administered. In embodiments, the population of cells, e.g., as described herein, comprises at least about 2e6 cells per kilogram body weight of the patient to which they are to be administered. In embodiments, the population of cells, e.g., as described herein, comprises at least about 3e6 cells per kilogram body weight of the patient to which they are to be administered. In embodiments, the population of cells, e.g., as described herein, comprises at least about 4e6 cells per kilogram body weight of the patient to which they are to be administered. In embodiments, the population of cells, e.g., as described herein, comprises at least about 5e6 cells per kilogram body weight of the patient to which they are to be administered. In embodiments, the population of cells, e.g., as described herein, comprises at least about 6e6 cells per kilogram body weight of the patient to which they are to be administered. In embodiments, the population of cells, e.g., as described herein, comprises at least about 7e6 cells per kilogram body weight of the patient to which they are to be administered. In embodiments, the population of cells, e.g., as described herein, comprises at least about 8e6 cells per kilogram body weight of the patient to which they are to be administered. In embodiments, the population of cells, e.g., as described herein, comprises at least about 9e6 cells per kilogram body weight of the patient to which they are to be administered. In embodiments, the population of cells, e.g., as described herein, comprises at least about 1e7 cells per kilogram body weight of the patient to which they are to be administered. In embodiments, the population of cells, e.g., as described herein, comprises at least about 2e7 cells per kilogram body weight of the patient to which they are to be administered. In embodiments, the population of cells, e.g., as described herein, comprises at least about 3e7 cells per kilogram body weight of the patient to which they are to be administered. In embodiments, the population of cells, e.g., as described herein, comprises at least about 4e7 cells per kilogram body weight of the patient to which they are to be administered. In embodiments, the population of cells, e.g., as described herein, comprises at least about 5e7 cells per kilogram body weight of the patient to which they are to be administered. In embodiments, the population of cells, e.g., as described herein, comprises at least about 6e7 cells per kilogram body weight of the patient to which they are to be administered. In embodiments, the population of cells, e.g., as described herein, comprises at least about 7e7 cells per kilogram body weight of the patient to which they are to be administered. In embodiments, the population of cells, e.g., as described herein, comprises at least about 8e7 cells per kilogram body weight of the patient to which they are to be administered. In embodiments, the population of cells, e.g., as described herein, comprises at least about 9e7 cells per kilogram body weight of the patient to which they are to be administered. In embodiments, the population of cells, e.g., as described herein, comprises at least about 1e8 cells per kilogram body weight of the patient to which they are to be administered. In any of the aforementioned embodiments, the population of cells may comprise at least about 50% (for example, at least about 60%, at least about 70%, at least about 80%, at least about 90%, at least about 95% or at least about 99%) HSPCs, e.g., CD34+ cells. In any of the aforementioned embodiments, the population of cells may comprise about 60% HSPCs, e.g., CD34+ cells. In an embodiment, the population of cells, e.g., as described herein, comprises about 3e7 cells and comprises about 2e7 HSPCs, e.g., CD34+ cells.

[0655] In embodiments, the population of cells, e.g., as described herein, comprises at least about 1e6 HSPCs, e.g., CD34+ cells, per kilogram body weight of the patient to which they are to be administered. In embodiments, the population of cells, e.g., as described herein, comprises at least about 1.5e6 HSPCs, e.g., CD34+ cells, per kilogram body weight of the patient to which they are to be administered. In embodiments, the population of cells, e.g., as described herein, comprises at least about 2e6 HSPCs, e.g., CD34+ cells, per kilogram body weight of the patient to which they are to be administered. In embodiments, the population of cells, e.g., as described herein, comprises at least about 3e6 HSPCs, e.g., CD34+ cells, per kilogram body weight of the patient to which they are to be administered. In embodiments, the population of cells, e.g., as described herein, comprises at least about 4e6 HSPCs, e.g., CD34+ cells, per kilogram body weight of the patient to which they are to be administered. In embodiments, the population of cells, e.g., as described herein, comprises at least about 5e6 HSPCs, e.g., CD34+ cells, per kilogram body weight of the patient to which they are to be administered. In embodiments, the population of cells, e.g., as described herein, comprises at least about 6e6 HSPCs, e.g., CD34+ cells, per kilogram body weight of the patient to which they are to be administered. In embodiments, the population of cells, e.g., as described herein, comprises at least about 7e6 HSPCs, e.g., CD34+ cells, per kilogram body weight of the patient to which they are to be administered. In embodiments, the population of cells, e.g., as described herein, comprises at least about 8e6 HSPCs, e.g., CD34+ cells, per kilogram body weight of the patient to which they are to be administered. In embodiments, the population of cells, e.g., as described herein, comprises at least about 9e6 HSPCs, e.g., CD34+ cells, per kilogram body weight of the patient to which they are to be administered. In embodiments, the population of cells, e.g., as described herein, comprises at least about 1e7 HSPCs, e.g., CD34+ cells, per kilogram body weight of the patient to which they are to be administered. In embodiments, the population of cells, e.g., as described herein, comprises at least about 2e7 HSPCs, e.g., CD34+ cells, per kilogram body weight of the patient to which they are to be administered. In embodiments, the population of cells, e.g., as described herein, comprises at least about 3e7 HSPCs, e.g., CD34+ cells, per kilogram body weight of the patient to which they are to be administered. In embodiments, the population of cells, e.g., as described herein, comprises at least about 4e7 HSPCs, e.g., CD34+ cells, per kilogram body weight of the patient to which they are to be administered. In embodiments, the population of cells, e.g., as described herein, comprises at least about 5e7 HSPCs, e.g., CD34+ cells, per kilogram body weight of the patient to which they are to be administered. In embodiments, the population of cells, e.g., as described herein, comprises at least about 6e7 HSPCs, e.g., CD34+ cells, per kilogram body weight of the patient to which they are to be administered. In embodiments, the population of cells, e.g., as described herein, comprises at least about 7e7 HSPCs, e.g., CD34+ cells, per kilogram body weight of the patient to which they are to be administered. In embodiments, the population of cells, e.g., as described herein, comprises at least about 8e7 HSPCs, e.g., CD34+ cells, per kilogram body weight of the patient to which they are to be administered. In embodiments, the population of cells, e.g., as described herein, comprises at least about 9e7 HSPCs, e.g., CD34+ cells, per kilogram body weight of the patient to which they are to be administered. In embodiments, the population of cells, e.g., as described herein, comprises at least about 1e8 HSPCs, e.g., CD34+ cells, per kilogram body weight of the patient to which they are to be administered. In embodiments, the population of cells, e.g., as described herein, comprises at least about 2e8 HSPCs, e.g., CD34+ cells, per kilogram body weight of the patient to which they are to be administered. In embodiments, the population of cells, e.g., as described herein, comprises at least about 3e8 HSPCs, e.g., CD34+ cells, per kilogram body weight of the patient to which they are to be administered. In embodiments, the population of cells, e.g., as described herein, comprises at least about 4e8 HSPCs, e.g., CD34+ cells, per kilogram body weight of the patient to which they are to be administered. In embodiments, the population of cells, e.g., as described herein, comprises at least about 5e8 HSPCs, e.g., CD34+ cells, per kilogram body weight of the patient to which they are to be administered.

[0656] In embodiments, the population of cells, e.g., as described herein, comprises about 1e6 HSPCs, e.g., CD34+ cells, per kilogram body weight of the patient to which they are to be administered. In embodiments, the population of cells, e.g., as described herein, comprises about 1.5e6 HSPCs, e.g., CD34+ cells, per kilogram body weight of the patient to which they are to be administered. In embodiments, the population of cells, e.g., as described herein, comprises about 2e6 HSPCs, e.g., CD34+ cells, per kilogram body weight of the patient to which they are to be administered. In embodiments, the population of cells, e.g., as described herein, comprises about 3e6 HSPCs, e.g., CD34+ cells, per kilogram body weight of the patient to which they are to be administered. In embodiments, the population of cells, e.g., as described herein, comprises about 4e6 HSPCs, e.g., CD34+ cells, per kilogram body weight of the patient to which they are to be administered. In embodiments, the population of cells, e.g., as described herein, comprises about 5e6 HSPCs, e.g., CD34+ cells, per kilogram body weight of the patient to which they are to be administered. In embodiments, the population of cells, e.g., as described herein, comprises about 6e6 HSPCs, e.g., CD34+ cells, per kilogram body weight of the patient to which they are to be administered. In embodiments, the population of cells, e.g., as described herein, comprises about 7e6 HSPCs, e.g., CD34+ cells, per kilogram body weight of the patient to which they are to be administered. In embodiments, the population of cells, e.g., as described herein, comprises about 8e6 HSPCs, e.g., CD34+ cells, per kilogram body weight of the patient to which they are to be administered. In embodiments, the population of cells, e.g., as described herein, comprises about 9e6 HSPCs, e.g., CD34+ cells, per kilogram body weight of the patient to which they are to be administered. In embodiments, the population of cells, e.g., as described herein, comprises about 1e7 HSPCs, e.g., CD34+ cells, per kilogram body weight of the patient to which they are to be administered. In embodiments, the population of cells, e.g., as described herein, comprises about 2e7 HSPCs, e.g., CD34+ cells, per kilogram body weight of the patient to which they are to be administered. In embodiments, the population of cells, e.g., as described herein, comprises about 3e7 HSPCs, e.g., CD34+ cells, per kilogram body weight of the patient to which they are to be administered. In embodiments, the population of cells, e.g., as described herein, comprises about 4e7 HSPCs, e.g., CD34+ cells, per kilogram body weight of the patient to which they are to be administered. In embodiments, the population of cells, e.g., as described herein, comprises about 5e7 HSPCs, e.g., CD34+ cells, per kilogram body weight of the patient to which they are to be administered. In embodiments, the population of cells, e.g., as described herein, comprises about 6e7 HSPCs, e.g., CD34+ cells, per kilogram body weight of the patient to which they are to be administered. In embodiments, the population of cells, e.g., as described herein, comprises about 7e7 HSPCs, e.g., CD34+ cells, per kilogram body weight of the patient to which they are to be administered. In embodiments, the population of cells, e.g., as described herein, comprises about 8e7 HSPCs, e.g., CD34+ cells, per kilogram body weight of the patient to which they are to be administered. In embodiments, the population of cells, e.g., as described herein, comprises about 9e7 HSPCs, e.g., CD34+ cells, per kilogram body weight of the patient to which they are to be administered. In embodiments, the population of cells, e.g., as described herein, comprises about 1e8 HSPCs, e.g., CD34+ cells, per kilogram body weight of the patient to which they are to be administered. In embodiments, the population of cells, e.g., as described herein, comprises about 2e8 HSPCs, e.g., CD34+ cells, per kilogram body weight of the patient to which they are to be administered. In embodiments, the population of cells, e.g., as described herein, comprises about 3e8 HSPCs, e.g., CD34+ cells, per kilogram body weight of the patient to which they are to be administered. In embodiments, the population of cells, e.g., as described herein, comprises about 4e8 HSPCs, e.g., CD34+ cells, per kilogram body weight of the patient to which they are to be administered. In embodiments, the population of cells, e.g., as described herein, comprises about 5e8 HSPCs, e.g., CD34+ cells, per kilogram body weight of the patient to which they are to be administered.

[0657] In embodiments, the population of cells, e.g., as described herein, comprises from about 2e6 to about 10e6 HSPCs, e.g., CD34+ cells, per kilogram body weight of the patient to which they are to be administered. In embodiments, the population of cells, e.g., as described herein, comprises from 2e6 to 10e6 HSPCs, e.g., CD34+ cells, per kilogram body weight of the patient to which they are to be administered.

[0658] The cells of the invention may comprise a gRNA molecule of the present invention, or nucleic acid encoding said gRNA molecule, and a Cas9 molecule of the present invention, or nucleic acid encoding said Cas9 molecule. In an embodiment, the cells of the invention may comprise a ribonuclear protein (RNP) complex which comprises a gRNA molecule of the invention and a Cas9 molecule of the invention.

[0659] The cells of the invention are preferrably modified to comprise a gRNA molecule of the invention ex vivo, for example by a method described herein, e.g., by electroporation.

[0660] The cells of the invention include cells in which expression of one or more genes has been altered, for example, reduced or inhibited, by introduction of a CRISPR system comprising a gRNA of the invention. For example, the cells of the present invention may have a reduced level of BCL11a expression relative to unmodified cells. As another example, the cells of the present invention may have an increased level of fetal hemoglobin expression relative to unmodified cells. As another example, the cells of the present invention may have reduced level of beta globin expression relative to unmodified cells. Alternatively, or in addition, a cell of the invention may give rise, e.g., differentiate into, another type of cell, e.g., an erythrocyte, that has a reduced level of BCL11a expression relative to cells differentiated from unmodified cells. Alternatively, or in addition, a cell of the invention may give rise, e.g., differentiate into, another type of cell, e.g., an erythrocyte, that has an increased level of fetal hemoglobin expression relative to cells differentiated from unmodified cells. Alternatively, or in addition, a cell of the invention may give rise, e.g., differentiate into, another type of cell, e.g., an erythrocyte, that has a reduced level of beta globin expression relative to cells differentiated from unmodified cells.

[0661] The cells of the invention include cells in which expression of one or more genes has been altered, for example, reduced or inhibited, by introduction of a CRISPR system comprising a gRNA of the invention. For example, the cells of the present invention may have a reduced level of hemeoglobin beta, for example a mutated or wild-type hemoglobin beta, expression relative to unmodified cells. In another aspect, the invention provides cells which are derived from, e.g., differentiated from, cells in which a CRISPR system comprising a gRNA of the invention has been introduced. In such aspects, the cells in which the CRISPR system comprising the gRNA of the invention has been introduced may not exhibit the reduced level of hemoglobin beta, for example a mutated or wild-type hemoglobin beta, but the cells derived from, e.g., differentiated from, said cells exhibit the reduced level of hemoglobin beta, for example a mutated or wild-type hemoglobin beta. In embodiments, the derivation, e.g., differentiation, is accomplished in vivo (e.g., in a patient). In embodiments the cells in which the CRISPR system comprising the gRNA of the invention has been introduced are CD34+ cells and the cells derived, e.g., differentiated, therefrom are of the erythroid lineage, e.g., red blood cells.

[0662] The cells of the invention include cells in which expression of one or more genes has been altered, for example, increased or promoted, by introduction of a CRISPR system comprising a gRNA of the invention. For example, the cells of the present invention may have an increased level of fetal hemoglobin expression relative to unmodified cells. In another aspect, the invention provides cells which are derived from, e.g., differentiated from, cells in which a CRISPR system comprising a gRNA of the invention has been introduced. In such aspects, the cells in which the CRISPR system comprising the gRNA of the invention has been introduced may not exhibit the increased level of fetal hemoglobin but the cells derived from, e.g., differentiated from, said cells exhibit the increased level of fetal hemoglobin. In embodiments, the derivation, e.g., differentiation, is accomplished in vivo (e.g., in a patient). In embodiments the cells in which the CRISPR system comprising the gRNA of the invention has been introduced are CD34+ cells and the cells derived, e.g., differentiated, therefrom are of the erythroid lineage, e.g., red blood cells.

[0663] In another aspect, the invention relates to cells which include an indel at (e.g., within) or near (e.g., within 20, 19, 18, 17, 16, 15, 14, 13, 12, 11, 10, 9, 8, 7, 6, 5, 4, 3, 2 or 1 nucleotides of) a nucleic acid sequence having complementarity to the gRNA molecule or gRNA molecules introduced into said cells. In embodiments, the indel is a frameshift indel. In embodiments, the indel is an indel listed in Table 15. In embodiments, the indel is an indel listed in Table 26, Table 27 or Table 37. In embodiments the invention pertains to a population of cells, e.g., as described herein, wherein the population of cells comprises cells having an indel listed in Table 15. In embodiments the invention pertains to a population of cells, e.g., as described herein, wherein the population of cells comprises cells having an indel listed in Table 26, Table 27 or Table 37.

[0664] In an aspect, the invention relates to a population of cells, e.g., a population of HSPCs, which comprises cells which include an indel, e.g., as described herein, e.g., an indel or pattern of indels described in FIG. 25, Table 15, Table 26, Table 27 or Table 37, at or near (e.g., within 20, 19, 18, 17, 16, 15, 14, 13, 12, 11, 10, 9, 8, 7, 6, 5, 4, 3, 2 or 1 nucleotides of) a nucleic acid sequence having complementarity to a gRNA molecule or gRNA molecules, e.g., as described herein, introduced into said cells, e.g., as described herein. In embodiments, the indel is a frameshift indel. In embodiments, 20%-100% of the cells of the population include said indel or indels. In embodiments, 30%-100% of the cells of the population include said indel or indels. In embodiments, 40%-100% of the cells of the population include said indel or indels. In embodiments, 50%-100% of the cells of the population include said indel or indels. In embodiments, 60%-100% of the cells of the population include said indel or indels. In embodiments, 70%-100% of the cells of the population include said indel or indels. In embodiments, 80%-100% of the cells of the population include said indel or indels. In embodiments, 90%-100% of the cells of the population include said indel or indels. In embodiments, the population of cells retains the ability to differentiate into multiple cell types, e.g., maintains the ability to differentiate into cells of erythroid lineage, e.g., red blood cells. In embodiments, the edited and differentiated cells (e.g., red blood cells) maintain the ability to proliferate, e.g., proliferate at least 5-fold, at least 10-fold, at least 15-fold, at least 20-fold, at least 25-fold, at least 30-fold, at least 35-fold, at least 40-fold, at least 45-fold, at least 50-fold or more after 7 days in erythroid differentiation medium (EDM), e.g., as described in the Examples, and/or, proliferate at least 30-fold, at least 35-fold, at least 40-fold, at least 45-fold, at least 50-fold, at least 55-fold, at least 60-fold, at least 65-fold, at least 70-fold, at least 75-fold, at least 80-fold, at least 85-fold, at least 90-fold, at least 95-fold, at least 100-fold, at least 110-fold, at least 120-fold, at least 130-fold, at least 140-fold, at least 150-fold, at least 200-fold, at least 300-fold, at least 400-fold, at least 500-fold, at least 600-fold, at least 700-fold, at least 800-fold, at least 900-fold, at least 1000-fold, at least 1100-fold, at least 1200-fold, at least 1300-fold, at least 1400-fold, at least 1500-fold or more after 21 days in erythroid differentiation medium (EDM), e.g., as described in the Examples,

[0665] In an embodiment, the invention provides a population of cells, e.g., CD34+ cells, of which at least 90%, e.g., at least 95%, e.g., at least 98%, of the cells of the population comprise an indel, e.g., as described herein (without being bound by theory, it is believed that introduction of a gRNA molecule or CRISPR system as described herein into a population of cells produces a pattern of indels in said population, and thus, each cell of the population which comprises an indel may not exhibit the same indel), at or near a site complementary to the targeting domain of a gRNA molecule described herein; wherein said cells maintain the ability to differentiate into cells of an erythroid lineage, e.g., red blood cells; and/or wherein said cells differentiated from the population of cells have an increased level of fetal hemoglobin (e.g., the population has a higher % F cells) relative to cells differentiated from a similar population of unmodified cells. In embodiments, the population of cells has undergone at least a 5-fold expansion ex vivo, e.g., in the media comprising Compound 4.

[0666] In embodiments, the indel is less than about 50 nucleotides, e.g., less than about 45, less than about 40, less than about 35, less than about 30 or less than about 25 nucleotides. In embodiments, the indel is less than about 25 nucleotides. In embodiments, the indel is less than about 20 nucleotides. In embodiments, the indel is less than about 15 nucleotides. In embodiments, the indel is less than about 10 nucleotides. In embodiments, the indel is less than about 9 nucleotides. In embodiments, the indel is less than about 9 nucleotides. In embodiments, the indel is less than about 7 nucleotides. In embodiments, the indel is less than about 6 nucleotides. In embodiments, the indel is less than about 5 nucleotides. In embodiments, the indel is less than about 4 nucleotides. In embodiments, the indel is less than about 3 nucleotides. In embodiments, the indel is less than about 2 nucleotides. In any of the aforementioned embodiments, the indel is at least 1 nucleotide. In embodiments, the indel is 1 nucleotide.

[0667] In an aspect, the invention provides a population of modified HSPCs or erythroid cells differentiated from said HSPCs (e.g., differentiated ex vivo or in a patient), e.g., as described herein, wherein at least 15%, at least 20%, at least 25%, at least 30%, at least 35%, at least 40%, at least 45%, at least 50%, at least 55%, at least 60%, at least 65%, at least 70%, at least 75%, at least 80%, at least 85%, at least 90%, or at least 95% of the cells are F cells. In embodiments, the population of cells contains (or is capable of differentiating, e.g., in vivo, into a population of erythrocytes that contains) a higher percent of F cells than a similar population of cells which have not had a gRNA molecule or gRNA molecules, e.g., as described herein, introduced into said cells. In embodiments, the population of cells has (or is capable of differentiating, e.g., in vivo, into a population of erythrocytes that has) at least a 20% increase, e.g, at least 21% increase, at least 22% increase, at least 23% increase, at least 24% increase, at least 25% increase, at least 26% increase, at least 27% increase, at least 28% increase, or at least 29% increase, in F cells relative to the similar population of cells which have not had a gRNA molecule or gRNA molecules, e.g., as described herein, introduced into said cells. In embodiments, the population of cells has (or is capable of differentiating, e.g., in vivo, into a population of erythrocytes that has) at least a 30% increase, e.g., at least a 35% increase, at least a 40% increase, at least a 45% increase, at least a 50% increase, at least a 55% increase, at least a 60% increase, at least a 65% increase, at least a 70% increase, at least a 75% increase, at least a 80% increase, at least a 85% increase, at least a 90% increase or at least a 95% increase, in F cells relative to the similar population of cells which have not had a gRNA molecule or gRNA molecules, e.g., as described herein, introduced into said cells. In embodiments, the population of cells has (or is capable of differentiating, e.g., in vivo, into a population of erythrocytes that has) at a 10-90%, a 20%-80%, a 20%-70%, a 20%-60%, a 20%-50%, a 20%-40%, a 20%-30%, a 25%-80%, a 25%-70%, a 25%-60%, a 25%-50%, a 25%-40%, a 25%-35%, a 25%-30%, a 30%-80%, a 30%-70%, a 30%-60%, a 30%-50%, a 30%-40%, or a 30%-35% increase in F cells relative to the similar population of cells which have not had a gRNA molecule or gRNA molecules, e.g., as described herein, introduced into said cells. In embodiments, the population of cells, e.g., as produced by a method described herein, comprises a sufficient number or cells and/or a sufficient increase in % F cells to treat a hemoglobinopathy, e.g., as described herein, e.g., sickle cell disease and/or beta thalassemia, in a patient in need thereof when introduced into said patient, e.g., in a therapeutically effective amount. In embodiments, the increase in F cells is as measured in an erythroid differentiation assay, e.g., as described herein.

[0668] In embodiments, including in any of the embodiments and aspects described herein, the invention relates to a cell, e.g., a population of cells, e.g., as modified by any of the gRNA, methods and/or CRISPR systems described herein, comprising F cells that produce at least 6 picograms fetal hemoglobin per cell. In embodiments, the F cells produce at least 7 picograms fetal hemoglobin per cell. In embodiments, the F cells produce at least 8 picograms fetal hemoglobin per cell. In embodiments, the F cells produce at least 9 picograms fetal hemoglobin per cell. In embodiments, the F cells produce at least 10 picograms fetal hemoglobin per cell. In embodiments, the F cells produce an average of between 6.0 and 7.0 picograms, between 7.0 and 8.0, between 8.0 and 9.0, between 9.0 and 10.0, between 10.0 and 11.0, or between 11.0 and 12.0 picograms of fetal hemoglobin per cell.

[0669] In embodiments, including in any of the aforementioned embodiments, the cell and/or population of cells of the invention includes, e.g., consists of, cells which do not comprise nucleic acid encoding a Cas9 molecule.

### Methods of Treatment

### Delivery Timing

[0670] In an embodiment, one or more nucleic acid molecules (e.g., DNA molecules) other than the components of a Cas system, e.g., the Cas9 molecule component and/or the gRNA molecule component described herein, are delivered. In an embodiment, the nucleic acid molecule is delivered at the same time as one or more of the components of the Cas system are delivered. In an embodiment, the nucleic acid molecule is delivered before or after (e.g., less than about 30 minutes, 1 hour, 2 hours, 3 hours, 6 hours, 9 hours, 12 hours, 1 day, 2 days, 3 days, 1 week, 2 weeks, or 4 weeks) one or more of the components of the Cas system are delivered. In an embodiment, the nucleic acid molecule is delivered by a different means than one or more of the components of the Cas system, e.g., the Cas9 molecule component and/or the gRNA molecule component, are delivered. The nucleic acid molecule can be delivered by any of the delivery methods described herein. For example, the nucleic acid molecule can be delivered by a viral vector, e.g., an integration-deficient lentivirus, and the Cas9 molecule component and/or the gRNA molecule component can be delivered by electroporation, e.g., such that the toxicity caused by nucleic acids (e.g., DNAs) can be reduced. In an embodiment, the nucleic acid molecule encodes a therapeutic protein, e.g., a protein described herein. In an embodiment, the nucleic acid molecule encodes an RNA molecule, e.g, an RNA molecule described herein.

### Bi-Modal or Differential Delivery of Components

[0671] Separate delivery of the components of a Cas system, e.g., the Cas9 molecule component and the gRNA molecule component, and more particularly, delivery of the components by differing modes, can enhance performance, e.g., by improving tissue specificity and safety. In an embodiment, the Cas9 molecule and the gRNA molecule are delivered by different modes, or as sometimes referred to herein as differential modes. Different or differential modes, as used herein, refer modes of delivery, that confer different pharmacodynamic or pharmacokinetic properties on the subject component molecule, e.g., a Cas9 molecule, gRNA molecule, template nucleic acid, or payload. E.g., the modes of delivery can result in different tissue distribution, different half-life, or different temporal distribution, e.g., in a selected compartment, tissue, or organ.

[0672] Some modes of delivery, e.g., delivery by a nucleic acid vector that persists in a cell, or in progeny of a cell, e.g., by autonomous replication or insertion into cellular nucleic acid, result in more persistent expression of and presence of a component. Examples include viral, e.g., adeno associated virus or lentivirus, delivery.

[0673] By way of example, the components, e.g., a Cas9 molecule and a gRNA molecule, can be delivered by modes that differ in terms of resulting half life or persistent of the delivered component the body, or in a particular compartment, tissue or organ. In an embodiment, a gRNA molecule can be delivered by such modes. The Cas9 molecule component can be delivered by a mode which results in less persistence or less exposure of its to the body or a particular compartment or tissue or organ.

[0674] More generally, in an embodiment, a first mode of delivery is used to deliver a first component and a second mode of delivery is used to deliver a second component. The first mode of delivery confers a first pharmacodynamic or pharmacokinetic property. The first pharmacodynamic property can be, e.g., distribution, persistence, or exposure, of the component, or of a nucleic acid that encodes the component, in the body, a compartment, tissue or organ. The second mode of delivery confers a second pharmacodynamic or pharmacokinetic property. The second pharmacodynamic property can be, e.g., distribution, persistence, or exposure, of the component, or of a nucleic acid that encodes the component, in the body, a compartment, tissue or organ.

[0675] In an embodiment, the first pharmacodynamic or pharmacokinetic property, e.g., distribution, persistence or exposure, is more limited than the second pharmacodynamic or pharmacokinetic property.

[0676] In an embodiment, the first mode of delivery is selected to optimize, e.g., minimize, a pharmacodynamic or pharmacokinetic property, e.g., distribution, persistence or exposure.

[0677] In an embodiment, the second mode of delivery is selected to optimize, e.g., maximize, a pharmacodynamic or pharmcokinetic property, e.g., distribution, persistence or exposure.

[0678] In an embodiment, the first mode of delivery comprises the use of a relatively persistent element, e.g., a nucleic acid, e.g., a plasmid or viral vector, e.g., an AAV or lentivirus. As such vectors are relatively persistent product transcribed from them would be relatively persistent.

[0679] In an embodiment, the second mode of delivery comprises a relatively transient element, e.g., an RNA or protein.

[0680] In an embodiment, the first component comprises gRNA, and the delivery mode is relatively persistent, e.g., the gRNA is transcribed from a plasmid or viral vector, e.g., an AAV or lentivirus. Transcription of these genes would be of little physiological consequence because the genes do not encode for a protein product, and the gR As are incapable of acting in isolation. The second component, a Cas9 molecule, is delivered in a transient manner, for example as mRNA or as protein, ensuring that the full Cas9 molecule/gRNA molecule complex is only present and active for a short period of time.

[0681] Furthermore, the components can be delivered in different molecular form or with different delivery vectors that complement one another to enhance safety and tissue specificity.

[0682] Use of differential delivery modes can enhance performance,’ safety and efficacy. For example, the likelihood of an eventual off-target modification can be reduced. Delivery of immunogenic components, e.g., Cas9 molecules, by less persistent modes can reduce immunogenicity, as peptides from the bacterially-derived Cas enzyme are displayed on the surface of the cell by MHC molecules. A two-part delivery system can alleviate these drawbacks.

[0683] Differential delivery modes can be used to deliver components to different, but overlapping target regions. The formation active complex is minimized outside the overlap of the target regions. Thus, in an embodiment, a first component, e.g., a gRNA molecule is delivered by a first delivery mode that results in a first spatial, e.g., tissue, distribution. A second component, e.g., a Cas9 molecule is delivered by a second delivery mode that results in a second spatial, e.g., tissue, distribution. In an embodiment, the first mode comprises a first element selected from a liposome, nanoparticle, e.g., polymeric nanoparticle, and a nucleic acid, e.g., viral vector. The second mode comprises a second element selected from the group. In an embodiment, the first mode of delivery comprises a first targeting element, e.g., a cell specific receptor or an antibody, and the second mode of delivery does not include that element. In an embodiment, the second mode of delivery comprises a second targeting element, e.g., a second cell specific receptor or second antibody.

[0684] When the Cas9 molecule is delivered in a virus delivery vector, a liposome, or polymeric nanoparticle, there is the potential for delivery to and therapeutic activity in multiple tissues, when it may be desirable to only target a single tissue. A two-part delivery system can resolve this challenge and enhance tissue specificity. If the gRNA molecule and the Cas9 molecule are packaged in separated delivery vehicles with distinct but overlapping tissue tropism, the fully functional complex is only be formed in the tissue that is targeted by both vectors.

[0685] Candidate Cas molecules, e.g., Cas9 molecules, candidate gRNA molecules, candidate Cas9 molecule/gRNA molecule complexes, and candidate CRISPR systems, can be evaluated by art-known methods or as described herein. For example, exemplary methods for evaluating the endonuclease activity of Cas9 molecule are described, e.g., in Jinek el al., SCIENCE 2012; 337(6096):816-821.

### EXAMPLES

### Example 1

### Guide Selection and Design

[0686] Initial guide selection was performed in silico using a human reference genome and user defined genomic regions of interest (e.g., a gene, an exon of a gene, non-coding regulatory region, etc), for identifying PAMs in the regions of interest. For each identified PAM, analyses were performed and statistics reported. gRNA molecules were further selected and rank-ordered based on a number of methods for determining efficiency and efficacy, e.g., as described herein.

[0687] Throughout the Examples, in the experiments below, either sgRNA molecules or dgRNA molecules were used. Unless indicated otherwise, where dgRNA molecules were used, the gRNA includes the following:

crRNA: [targeting domain]-[SEQ ID NO: 6607]
tracr (trRNA): SEQ ID NO: 6660

[0688] Unless indicated otherwise, in experiments employing a sgRNA molecule, the following sequence was used:

[targeting domain]-[SEQ ID NO: 6601]-UUUU

[0689] Unless indicated otherwise, in experiments employing a sgRNA molecule labeled “BC”, the following sequence was used:

[targeting domain]-[SEQ ID NO: 6604]-UUUU

### Transfection of HEK-293 Cas9GFP Cells for Primary Guide Screening

[0690] Transfection of Cas9GFP-expressing HEK293 cells (HEK-293_Cas9GFP) was used for primary screening of target specific crRNAs. In this example, target specific crRNAs were designed and selected for primary screening using defined criteria including in silico off-target detection, e.g., as described herein. Selected crRNAs were chemically synthesized and delivered in a 96 well format. HEK-293-Cas9GFP cells were transfected with target crRNAs in a 1:1 ratio with stock trRNA. The transfection was mediated using lipofection technology according to manufacturer's protocol (Lipofectamine 2000, Life Technologies). Transfected cells were lysed 24 h following lipofection and editing (e.g., cleavage) was detected within lysates with the T7E1 assay and/or next generation sequencing (NGS; below).

### T7E1 Assay

[0691] The T7E1 assay was used to detect mutation events in genomic DNA such as insertions, deletions and substitutions created through non-homologous end joining (NHEJ) following DNA cleavage by Cas9 (See Cho et al., Targeted genome engineering in human cells with the Cas9 RNA-guided endonuclease. Nature Biotechnology. 2013; 31, 230-232).

[0692] Genomic DNA regions that have been targeted for cutting by CRISPR/Cas9 were amplified by PCR, denatured at 95° C. for 10 minutes, and then re-annealed by ramping down from 95° C. to 25° C. at 0.5° C. per second. If mutations were present within the amplified region, the DNA combined to form heteroduplexes. The re-annealed heteroduplexes were then digested with T7E1 (New England Biolabs) at 37° C. for 25 minutes or longer. T7E1 endonuclease recognizes DNA mismatches, heteroduplexes and nicked double stranded DNA and generates a double stranded break at these sites. The resulting DNA fragments were analyzed using a Fragment Analyzer and quantified to determine cleavage efficiency.

### Next-Generation Sequencing (NGS) and Analysis for On-Target Cleavage Efficiency and Indel Formation

[0693] To determine the efficiency of editing (e.g., cleaving) the target location in the genome, deep sequencing was utilized to identify the presence of insertions and deletions introduced by non-homologous end joining.

[0694] PCR primers were first designed around the target site, and the genomic area of interest PCR amplified. Additional PCR was performed according to manufacturer's protocols (Illumina) to add the necessary chemistry for sequencing. The amplicons were then sequenced on an Illumina MiSeq instrument. The reads were then aligned to the human reference genome (e.g., hg38) after eliminating those having low quality scores. From the resulting files containing the reads mapped to the reference genome (BAM files), reads which overlap the target region of interest were selected and the number of wild type reads versus the number of reads which contain an insertion or deletion was calculated. The editing percentage was then defined as the total number of reads with insertions or deletions over the total number of reads, including wild type. To determine the pattern of insertions and/or deletions that resulted from the edit, the aligned reads with indels were selected and the number of a reads with a given indel were summed. This information was then displayed as a list as well as visualized in the form on histograms which represent the frequency of each indel.

### RNP Generation

[0695] The addition of crRNA and trRNA to Cas9 protein results in the formation of the active Cas9 ribonucleoprotein complex (RNP), which mediates binding to the target region specified by the crRNA and specific cleavage of the targeted genomic DNA. This complex was formed by loading trRNA and crRNA into Cas9, which is believed to cause conformational changes to Cas9 allowing it to bind and cleave dsDNA.

[0696] The crRNA and trRNA were separately denatured at 95° C. for 2 minutes, and allowed to come to room temperature. Cas9 protein (10 mg/ml) was added to 5×CCE buffer (20 mM HEPES, 100 mM KCl, 5 mM MgCl₂, 1 mM DTT, 5% glycerol), to which trRNA and the various crRNAs were then added (in separate reactions) and incubated at 37° C. for 10 minutes, thereby forming the active RNP complex. The complex was delivered by electroporation and other methods into a wide variety of cells, including HEK-293 and CD34+ hematopoietic cells.

### Delivery of RNPs to CD34+ HSCs

[0697] Cas9 RNPs were delivered into CD34+ HSCs.

[0698] CD34+ HSCs were thawed and cultured (at 500,000 cells/ml) overnight in StemSpan SFEM (StemCell Technologies) media with IL12, SCF, TPO, Flt3L and Pen/Strep added. Roughly 90,000 cells were aliquoted and pelleted per each RNP delivery reaction. The cells were then resuspended in 60 ul P3 nucleofection buffer (Lonza), to which active RNP was subsequently added. The HSCs were then electroporated (e.g., nucleofected using program CA-137 on a Lonza Nucleofector) in triplicate (20 uL/electroporation). Immediately following electroporation, StemSpan SFEM media (with IL12, SCF, TPO, Flt3L and Pen/Strep) was added to the HSCs, which were cultured for at least 24 hours. HSCs were then harvested and subjected to T7E1, NGS, and/or surface marker expression analyses.

### HSC Functional Assay

[0699] CD34+ HSCs may be assayed for stem cell phenotype using known techniques such as flow cytometry or the in vitro colony forming assay. By way of example, cells were assayed by the in vitro colony forming assay (CFC) using the Methocult H4034 Optimum kit (StemCell Technologies) using the manufacturer's protocol. Briefly, 500-2000 CD34+ cells in <=100 ul volume are added to 1-1.25 ml methocult. The mixture was vortexed vigorously for 4-5 seconds to mix thoroughly, then allowed to rest at room temperature for at least 5 minutes. Using a syringe, 1-1.25 ml of MethoCult+ cells was transferred to a 35 mm dish or well of a 6-well plate. Colony number and morphology was assessed after 12-14 days as per the manufacturer's protocol.

### In Vivo Xeno-Transplantation

[0700] HSCs are functionally defined by their ability to self-renew and for multi-lineage differentiation. This functionality can only be assessed in vivo. The gold-standard for determining human HSC function is through xeno-transplantation into the NOD-SCID gamma mouse (NSG) that through a series of mutations is severely immunocompromised and thus can act as a recipient for human cells. HSCs following editing will be transplanted into NSG mice to validate that the induced edit does not impact HSC function. Monthly peripheral blood analysis will be used to assess human chimerism and lineage development and secondary transplantation following 20 weeks will be used to establish the presence of functional HSCs.

### Results

[0701] The results of editing using gRNA molecules (e.g., dgRNA molecules as describe above) described herein, in HEK293_Cas9GFP cells, as assayed by T7E1 (“T7”) and/or NGS are summarized in FIG. 1 (gRNAs molecules to +58 BCL11a enhancer region) and FIG. 2 (gRNA moleucles to +62 BCL11a enhancer region), and in the tables below, as indicated. Average editing in CD34+ HSPCs are reported in, for example, Table 10 (gRNAs molecules to +58 BCL11a enhancer region), Table 11 (gRNAs molecules to +62 BCL11a enhancer region), Table 12B (gRNAs molecules to +55 BCL11a enhancer region), and Table 13 (gRNAs molecules to the French HPFH region), below. Where T7E1 assay results are reported, “2” indicates high efficiency cutting; “1” indicates low efficiency cutting, and “0” indicates no cutting. In general, T7E1 results correlate with the quantitative cutting assayed by NGS. Top 15 gRNAs (as ranked by highest % editing in CD34+ cells) are shown in FIG. 11 (+58 BCL11a enhancer region) and FIG. 12 (+62 BCL11a enhancer region).

TABLE 10
Bcl11a +58 enhancer region crRNA 1° Screen results in
CD34+ HSPCs (by NGS, n = 3).

| | Average % | |
|---|---|---|
| Targeting Domain | Editing | |
| ID | (n = 3) | StDev |
| CR000242 | 1.4% | 0.3% |
| CR000243 | n/a | n/a |
| CR000244 | 3.7% | 1.0% |
| CR000245 | 24.7% | 1.4% |
| CR000246 | 24.2% | 0.3% |
| CR000247 | 3.6% | 0.6% |
| CR000248 | 6.4% | 0.5% |
| CR000249 | 13.3% | 0.6% |
| CR000250 | 4.8% | 0.5% |
| CR000251 | 4.7% | 0.5% |
| CR000252 | 2.7% | 0.5% |
| CR000253 | 9.0% | 0.6% |
| CR000255 | n/a | n/a |
| CR000256 | 1.3% | 0.2% |
| CR000257 | 2.4% | 0.4% |
| CR000258 | 2.0% | 0.0% |
| CR000259 | 3.9% | 0.4% |
| CR000260 | 32.7% | 2.3% |
| CR000261 | 17.9% | 0.9% |
| CR000264 | 2.1% | 0.2% |
| CR000266 | 2.9% | 0.1% |
| CR000267 | 3.9% | 0.1% |
| CR000268 | 6.3% | 0.6% |
| CR000269 | 4.4% | 0.2% |
| CR000270 | 2.7% | 0.9% |
| CR000271 | 7.2% | 1.4% |
| CR000272 | 11.9% | 2.9% |
| CR000273 | 3.1% | 0.2% |
| CR000274 | 1.4% | 0.1% |
| CR000275 | 9.6% | 0.6% |
| CR000276 | 14.5% | 0.5% |
| CR000277 | 8.6% | 0.5% |
| CR000278 | 4.8% | 0.6% |
| CR000279 | 6.5% | 0.9% |
| CR000280 | 7.9% | 0.8% |
| CR000281 | 3.3% | 0.7% |
| CR000282 | 10.1% | 1.2% |
| CR000283 | 4.7% | 0.2% |
| CR000284 | 5.8% | 0.1% |
| CR000285 | 8.9% | 1.2% |
| CR000286 | 20.2% | 1.1% |
| CR000287 | 10.1% | 1.0% |
| CR000288 | 1.6% | 0.1% |
| CR000289 | 3.0% | 0.4% |
| CR000290 | 2.3% | 0.4% |
| CR000291 | 2.8% | 0.1% |
| CR000292 | 9.9% | 0.9% |
| CR000293 | n/a | n/a |
| CR000294 | 2.7% | 0.5% |
| CR000295 | 1.9% | 0.4% |
| CR000296 | 2.8% | 0.4% |
| CR000297 | 5.7% | 0.4% |
| CR000298 | 2.2% | 0.2% |
| CR000299 | 2.9% | 0.2% |
| CR000300 | 2.3% | 0.2% |
| CR000301 | 10.2% | 0.8% |
| CR000302 | 5.0% | 0.6% |
| CR000303 | 3.7% | 0.3% |
| CR000304 | 6.2% | 0.8% |
| CR000305 | 7.7% | 2.2% |
| CR000306 | 4.0% | 2.2% |
| CR000307 | 8.8% | 3.6% |
| CR000308 | 39.9% | 1.7% |
| CR000309 | 38.3% | 8.2% |
| CR000310 | 56.8% | 1.0% |
| CR000311 | 46.0% | 1.2% |
| CR000312 | 48.5% | 1.7% |
| CR000313 | 41.2% | 4.4% |
| CR000314 | 29.9% | 0.9% |
| CR000315 | 32.0% | 2.9% |
| CR000316 | 3.9% | 1.0% |
| CR000317 | 2.8% | 0.3% |
| CR000318 | 2.6% | 0.2% |
| CR000319 | 7.9% | 1.8% |
| CR000320 | 1.9% | 0.1% |
| CR000321 | 13.2% | 1.7% |
| CR000322 | 5.2% | 0.8% |
| CR000323 | 20.3% | 2.1% |
| CR000324 | 2.2% | 0.4% |
| CR000325 | 8.4% | 0.9% |
| CR000326 | 1.4% | 0.2% |
| CR000327 | 6.9% | 1.7% |
| CR000328 | 2.6% | 0.4% |
| CR000329 | 1.1% | 0.1% |
| CR000330 | 1.7% | 0.2% |
| CR000331 | 22.0% | 0.9% |
| CR000332 | 3.2% | 1.0% |
| CR000333 | 3.8% | 0.7% |
| CR000334 | 3.2% | 0.1% |
| CR000335 | 2.7% | 0.3% |
| CR000336 | 2.2% | 0.2% |
| CR000337 | 7.2% | 1.0% |
| CR000338 | 10.3% | 1.8% |
| CR000339 | 4.2% | 0.2% |
| CR000340 | 4.6% | 0.6% |
| CR000341 | 7.5% | 1.4% |
| CR001124 | 26.1% | 2.0% |
| CR001125 | 8.4% | 1.6% |
| CR001126 | 17.2% | 5.8% |
| CR001127 | 7.4% | 2.3% |
| CR001128 | 9.0% | 0.9% |
| CR001129 | 16.5% | 6.0% |
| CR001130 | 11.1% | 8.3% |
| CR001131 | 54.1% | 4.9% |

TABLE 11
Bcl11a +62 enhancer region crRNA 1° Screen results in CD34+ HSPCs
(by NGS, n = 3).

| | Average % | |
|---|---|---|
| Targeting Domain ID | Edit (n = 3) | StDev |
| CR000171 | 4.4 | 0.7 |
| CR000172 | 4.6 | 2.4 |
| CR000173 | 3.1 | 0.7 |
| CR000174 | 27.6 | 6.5 |
| CR000175 | 14.7 | 1.0 |
| CR000176 | 2.1 | 0.6 |
| CR000177 | 7.6 | 2.3 |
| CR000178 | 7.1 | 1.7 |
| CR000179 | 7.7 | 1.8 |
| CR000180 | 2.8 | 0.5 |
| CR000181 | 25.6 | 3.8 |
| CR000182 | 27.6 | 3.5 |
| CR000183 | 30.5 | 6.9 |
| CR000184 | 4.2 | 1.9 |
| CR000185 | 11.4 | 0.7 |
| CR000186 | 7.2 | 3.7 |
| CR000187 | 46.3 | 2.2 |
| CR000188 | 21.0 | 6.0 |
| CR000189 | 22.3 | 2.1 |
| CR000190 | 20.2 | 5.7 |
| CR000191 | 38.2 | 7.9 |
| CR000192 | 5.4 | 1.8 |
| CR000193 | 14.7 | 2.0 |
| CR000194 | 13.5 | 0.7 |
| CR000195 | 8.2 | 1.2 |
| CR000196 | 27.0 | 6.4 |
| CR000197 | 6.6 | 0.6 |
| CR000198 | 8.7 | 3.2 |
| CR000199 | 3.3 | 1.3 |
| CR000200 | 6.9 | 0.5 |
| CR000201 | 1.6 | 0.5 |
| CR000202 | 28.1 | 5.6 |
| CR000203 | 43.7 | 0.5 |
| CR000204 | 35.1 | 2.2 |
| CR000205 | 53.6 | 0.8 |
| CR000206 | 52.8 | 6.0 |
| CR000207 | 2.5 | 0.3 |
| CR000208 | 31.5 | 7.5 |
| CR000209 | 13.5 | 2.9 |
| CR000210 | 28.7 | 6.6 |
| CR000211 | 59.3 | 5.5 |
| CR000212 | 40.0 | 1.6 |
| CR000213 | 13.6 | 7.1 |
| CR000214 | 9.4 | 0.7 |
| CR000215 | 37.0 | 6.9 |
| CR000216 | 25.3 | 2.6 |
| CR000217 | 7.6 | 1.6 |
| CR000218 | 5.1 | 1.3 |
| CR000221 | 12.4 | 3.5 |
| CR000222 | 7.2 | 2.6 |
| CR000223 | 8.4 | 2.1 |
| CR000224 | 13.9 | 5.3 |
| CR000225 | 10.3 | 4.4 |
| CR000227 | 12.6 | 1.8 |
| CR000228 | 13.5 | 4.8 |
| CR000229 | 3.2 | 0.8 |

TABLE 12A
Bcl11a +55 enhancer region crRNA 1° Screen results
in HEK-293-Cas9 Cells

| Targeting Domain | Average % Edit | |
|---|---|---|
| ID | (n = 3) | StDev |
| CR002142 | 25.0 | 2.0 |
| CR002143 | n/a | n/a |
| CR002144 | 51.2 | 8.3 |
| CR002145 | 51.0 | 3.3 |
| CR002146 | n/a | n/a |
| CR002147 | n/a | n/a |
| CR002148 | 13.7 | 4.3 |
| CR002149 | 22.3 | 4.5 |
| CR002150 | 43.8 | 9.0 |
| CR002151 | 31.1 | 0.6 |
| CR002152 | 33.2 | 8.7 |
| CR002153 | 24.5 | 7.8 |
| CR002154 | 62.1 | 3.9 |
| CR002155 | 48.2 | 10.9 |
| CR002156 | 57.4 | 8.5 |
| CR002157 | 46.6 | 4.3 |
| CR002158 | 11.0 | 1.7 |
| CR002159 | 13.7 | 2.3 |
| CR002160 | 37.8 | 0.8 |
| CR002161 | 61.5 | 4.6 |
| CR002162 | 47.0 | 14.0 |
| CR002163 | 52.2 | 9.6 |
| CR002164 | 58.5 | 4.4 |
| CR002165 | 61.5 | 6.8 |
| CR002166 | 42.6 | 11.3 |
| CR002167 | 37.8 | 4.7 |
| CR002168 | 32.0 | 12.9 |
| CR002169 | 48.5 | 6.3 |
| CR002170 | 44.8 | 2.9 |
| CR002171 | n/a | n/a |
| CR002172 | n/a | n/a |
| CR002173 | n/a | n/a |
| CR002174 | 59.8 | 3.8 |
| CR002175 | 22.1 | 1.3 |
| CR002176 | 35.4 | 5.9 |
| CR002177 | n/a | n/a |
| CR002178 | 25.9 | 3.2 |
| CR002179 | n/a | n/a |
| CR002180 | 57.6 | 6.4 |
| CR002181 | 63.8 | 3.9 |
| CR002182 | n/a | n/a |
| CR002183 | n/a | n/a |
| CR002184 | 30.0 | 4.0 |
| CR002185 | n/a | n/a |
| CR002186 | n/a | n/a |
| CR002187 | 51.6 | 2.9 |
| CR002188 | 35.8 | 8.7 |
| CR002189 | 62.7 | 6.0 |
| CR002190 | n/a | n/a |
| CR002191 | 37.4 | 7.4 |
| CR002192 | n/a | n/a |
| CR002193 | 6.1 | 1.7 |
| CR002194 | n/a | n/a |
| CR002195 | 60.0 | 9.4 |
| CR002196 | 42.9 | 13.7 |
| CR002197 | 52.2 | 2.8 |
| CR002198 | n/a | n/a |
| CR002199 | n/a | n/a |
| CR002200 | 4.3 | 1.0 |
| CR002201 | 1.8 | 0.3 |
| CR002202 | 2.6 | 0.3 |
| CR002203 | 50.7 | 5.3 |
| CR002204 | n/a | n/a |
| CR002205 | n/a | n/a |
| CR002206 | n/a | n/a |
| CR002207 | n/a | n/a |
| CR002208 | n/a | n/a |
| CR002209 | n/a | n/a |
| CR002210 | n/a | n/a |
| CR002211 | n/a | n/a |
| CR002212 | n/a | n/a |
| CR002213 | n/a | n/a |
| CR002214 | n/a | n/a |
| CR002215 | 51.7 | 8.9 |
| CR002216 | 14.1 | 8.3 |
| CR002217 | 50.1 | 10.5 |
| CR002218 | 45.0 | 19.4 |
| CR002219 | 30.7 | 14.7 |
| CR002220 | 44.7 | 13.3 |
| CR002221 | n/a | n/a |
| CR002222 | 64.0 | 3.9 |
| CR002223 | n/a | n/a |
| CR002224 | n/a | n/a |
| CR002225 | n/a | n/a |
| CR002226 | n/a | n/a |
| CR002227 | n/a | n/a |
| CR002228 | 10.4 | 5.6 |
| CR002229 | n/a | n/a |

n/a = not assessed

[0702] After the experiment above, the same guide RNA molecules were tested again in triplicate in both HEK-293-Cas9 cells and in CD34+ cells using a newly designed set of primers for the NGS analysis. The results are reported below in Table 12B.

TABLE 12B
Bcl11a +55 enhancer region crRNA screen results in
HEK-293-Cas9 Cells and in CD34+ HSPCs (by NGS, n = 3).

| | Editing % HEK- | Editing % |
|---|---|---|
| | 293-Cas9 Cells | CD34+ HSPCs |
| ID | (n = 3) | (n = 3) |
| CR002142 | 2.1 | 2.07 |
| CR002143 | 39.6 | 2.31 |
| CR002144 | 74.3 | 4.70 |
| CR002145 | 72.1 | 11.46 |
| CR002146 | 77.2 | 5.18 |
| CR002147 | 37.3 | 3.13 |
| CR002148 | 34.6 | 2.02 |
| CR002149 | 40.7 | 3.16 |
| CR002150 | 64.4 | 4.01 |
| CR002151 | 70.5 | 5.05 |
| CR002152 | 63.6 | 6.59 |
| CR002153 | 42.2 | 2.82 |
| CR002154 | 71.0 | 17.89 |
| CR002155 | 60.3 | 6.01 |
| CR002156 | 62.3 | 9.43 |
| CR002157 | 38.5 | 4.72 |
| CR002158 | 12.4 | 2.16 |
| CR002159 | 14.8 | 3.64 |
| CR002160 | 72.8 | 7.97 |
| CR002161 | 74.5 | 18.12 |
| CR002162 | 64.8 | 4.53 |
| CR002163 | 86.7 | 13.92 |
| CR002164 | 3.2 | 10.23 |
| CR002165 | 78.3 | 9.74 |
| CR002166 | 67.2 | 7.78 |
| CR002167 | 51.6 | 29.26 |
| CR002168 | 29.9 | 4.15 |
| CR002169 | 80.2 | 9.11 |
| CR002170 | 83.0 | 16.17 |
| CR002171 | 67.8 | 4.83 |
| CR002172 | 64.3 | 7.59 |
| CR002173 | 80.7 | 6.00 |
| CR002174 | 78.2 | 26.89 |
| CR002175 | 79.4 | 27.08 |
| CR002176 | 39.5 | 5.14 |
| CR002177 | 66.7 | 21.45 |
| CR002178 | 52.5 | 12.74 |
| CR002179 | 83.1 | 38.88 |
| CR002180 | 51.3 | 5.46 |
| CR002181 | 54.0 | 12.54 |
| CR002182 | 67.9 | 28.01 |
| CR002183 | 30.3 | 3.52 |
| CR002184 | 67.1 | 21.31 |
| CR002185 | 65.6 | 8.18 |
| CR002186 | 58.9 | 8.16 |
| CR002187 | 70.2 | 10.05 |
| CR002188 | 56.6 | 9.92 |
| CR002189 | 71.9 | 31.14 |
| CR002190 | 27.4 | 6.84 |
| CR002191 | 70.0 | 17.54 |
| CR002192 | 62.6 | 6.92 |
| CR002193 | 1.6 | 0.67 |
| CR002194 | 82.5 | 24.52 |
| CR002195 | 64.4 | 36.32 |
| CR002196 | 2.1 | 0.96 |
| CR002197 | 63.8 | 37.29 |
| CR002198 | 67.8 | 16.45 |
| CR002199 | 61.3 | 9.78 |
| CR002200 | 3.1 | 1.10 |
| CR002201 | 1.2 | 0.84 |
| CR002202 | 2.8 | 0.82 |
| CR002203 | 49.9 | 0.84 |
| CR002204 | 43.2 | 17.48 |
| CR002205 | 60.6 | 11.06 |
| CR002206 | 48.5 | 9.02 |
| CR002207 | 49.4 | 12.29 |
| CR002208 | 61.7 | 16.56 |
| CR002209 | 61.2 | 9.36 |
| CR002210 | 57.6 | 27.77 |
| CR002211 | 45.4 | 30.93 |
| CR002212 | 56.0 | 31.55 |
| CR002213 | 34.4 | 10.40 |
| CR002214 | 11.1 | 1.77 |
| CR002215 | 49.3 | 40.23 |
| CR002216 | 22.1 | 1.80 |
| CR002217 | 52.3 | 11.29 |
| CR002218 | 73.7 | 11.17 |
| CR002219 | 34.2 | 7.94 |
| CR002220 | 64.8 | 8.63 |
| CR002221 | 20.7 | 5.66 |
| CR002222 | 78.9 | 30.01 |
| CR002223 | 8.2 | 1.21 |
| CR002224 | 7.8 | n.d |
| CR002225 | n.d | n.d |
| CR002226 | 2.6 | n.d |
| CR002227 | n.d | n.d |
| CR002228 | 23.2 | 3.65 |
| CR002229 | 39.0 | n.d |

n.d. = not determined

TABLE 13
French HPFH region crRNA 1° Screen results in
HEK-293-Cas9 Cells and in CD34+ HSPCs (by NGS, n = 3).

| | Average Edit % | Average Edit % | StDev (%) for |
|---|---|---|---|
| Targeting | HEK-293-Cas9 | CD34+ HSPCs | % Edit in |
| Domain ID | (n = 3) | (n = 3) | CD34+ HSPCs |
| CR001016 | 33.1 | 24.0 | 1.2 |
| CR001017 | 30.4 | 19.5 | 1.5 |
| CR001018 | 46.5 | 53.0 | 3.4 |
| CR001019 | 45.9 | 57.6 | 2.3 |
| CR001020 | 62.1 | 47.7 | 9.3 |
| CR001021 | 29.1 | 34.2 | 1.8 |
| CR001022 | 66.1 | 66.2 | 2.3 |
| CR001023 | 27.3 | 46.0 | 6.1 |
| CR001024 | 62.5 | 73.4 | 6.9 |
| CR001025 | 25.5 | 24.5 | 1.6 |
| CR001026 | 61.4 | 72.1 | 2.9 |
| CR001027 | 23.3 | 33.2 | 2.2 |
| CR001028 | 47.7 | 72.1 | 4.9 |
| CR001029 | 53.9 | 61.2 | 5.7 |
| CR001030 | 49.2 | 49.9 | 29.0 |
| CR001031 | 42.7 | 65.0 | 9.3 |
| CR001032 | 67.6 | 50.1 | 9.7 |
| CR001033 | 15.3 | 44.5 | 3.2 |
| CR001034 | 28.5 | 52.9 | 2.7 |
| CR001035 | 16.9 | 28.5 | 16.4 |
| CR001036 | 28.0 | 68.3 | 3.7 |
| CR001037 | 52.7 | 53.2 | 4.2 |
| CR001038 | 1.9 | 23.7 | 20.6 |
| CR001039 | 2.2 | 35.8 | 2.8 |
| CR001040 | nd | n/a | 0.0 |
| CR001041 | nd | n/a | 0.0 |
| CR001042 | 2.7 | n/a | 0.0 |
| CR001043 | nd | n/a | 0.0 |
| CR001044 | 4.9 | 1.5 | 0.4 |
| CR001045 | 38.1 | 31.2 | 2.0 |
| CR001046 | 18.4 | 28.4 | 3.9 |
| CR001047 | nd | n/a | 0.0 |
| CR001048 | 1.6 | 0.2 | 0.3 |
| CR001049 | nd | n/a | 0.0 |
| CR001050 | nd | n/a | 0.0 |
| CR001051 | nd | n/a | 0.0 |
| CR001052 | nd | n/a | 0.0 |
| CR001053 | 5.8 | 4.4 | 0.7 |
| CR001054 | 9.0 | 4.1 | 0.4 |
| CR001055 | 5.2 | 0.1 | 0.1 |
| CR001056 | 7.7 | 5.0 | 0.3 |
| CR001057 | 25.2 | 7.8 | 0.8 |
| CR001058 | 41.6 | 29.5 | 6.7 |
| CR001059 | 5.2 | 4.9 | 0.1 |
| CR001060 | 43.5 | 18.7 | 5.2 |
| CR001061 | 21.7 | 4.7 | 0.8 |
| CR001062 | 12.2 | 5.2 | 1.1 |
| CR001063 | 16.6 | 21.5 | 1.6 |
| CR001064 | 6.0 | 4.2 | 0.7 |
| CR001065 | 43.0 | 20.0 | 1.4 |
| CR001066 | 11.1 | 4.2 | 0.4 |
| CR001067 | 25.7 | 7.9 | 3.5 |
| CR001068 | 11.3 | 5.9 | 1.6 |
| CR001069 | 15.1 | 2.9 | 0.2 |
| CR001070 | 38.2 | 11.1 | 3.1 |
| CR001071 | 34.6 | 8.5 | 0.2 |
| CR001072 | 22.8 | 3.5 | 0.4 |
| CR001073 | 45.2 | 18.1 | 4.1 |
| CR001074 | 40.1 | 38.1 | 2.5 |
| CR001075 | 53.0 | 29.2 | 1.8 |
| CR001076 | 25.6 | 1.8 | 0.1 |
| CR001077 | 8.9 | 12.2 | 0.4 |
| CR001078 | 10.9 | 17.7 | 3.3 |
| CR001079 | 18.3 | 7.8 | 0.9 |
| CR001080 | 21.3 | 17.4 | 5.6 |
| CR001081 | 22.0 | 21.4 | 0.5 |
| CR001082 | 5.4 | 8.5 | 0.6 |
| CR001083 | 12.3 | 11.6 | 0.5 |
| CR001084 | 25.4 | 9.5 | 4.5 |
| CR001085 | 18.3 | 12.4 | 1.7 |
| CR001086 | 25.3 | 4.4 | 2.0 |
| CR001087 | 16.4 | 6.9 | 0.9 |
| CR001088 | 9.6 | 18.4 | 1.9 |
| CR001089 | nd | 15.8 | 12.9 |
| CR001090 | 16.9 | 30.1 | 3.5 |
| CR001091 | 11.4 | 0.8 | 0.5 |
| CR001092 | 17.4 | 17.0 | 9.8 |
| CR001093 | 23.0 | 13.0 | 4.5 |
| CR001094 | 10.0 | 24.9 | 5.4 |
| CR001095 | 22.1 | 34.8 | 3.6 |
| CR001096 | 29.8 | 20.4 | 2.0 |
| CR001097 | 17.9 | 20.5 | 0.5 |
| CR001098 | 49.8 | 34.7 | 5.1 |
| CR001099 | 24.7 | 39.9 | 1.8 |
| CR001100 | nd | 33.2 | 2.8 |
| CR001101 | 16.9 | 24.7 | 2.1 |
| CR001102 | 29.4 | 13.9 | 0.7 |
| CR001103 | 9.9 | 8.6 | 2.2 |
| CR001104 | 11.3 | 3.3 | 0.7 |
| CR001105 | 5.0 | 3.6 | 0.9 |
| CR001106 | 15.7 | 13.1 | 1.6 |
| CR001107 | 31.2 | 8.5 | 4.5 |
| CR001108 | 16.1 | 3.2 | 0.5 |
| CR001109 | 12.1 | 4.6 | 2.1 |
| CR001110 | 23.5 | 6.0 | 3.0 |
| CR001111 | 12.3 | 2.6 | 1.3 |
| CR001132 | 18.7 | 3.4 | 0.4 |
| CR001133 | 35.4 | 27.0 | 4.2 |
| CR001134 | 12.3 | 0.3 | 0.2 |
| CR001135 | 57.8 | 16.2 | 2.7 |
| CR001136 | 7.1 | 1.7 | 0.5 |
| CR001137 | 31.2 | 6.2 | 2.7 |
| CR001138 | 45.4 | 9.6 | 1.2 |
| CR001139 | nd | 3.3 | 0.3 |
| CR001140 | 28.7 | 11.2 | 1.2 |
| CR001141 | 3.6 | 1.5 | 0.5 |
| CR001142 | 56.7 | 9.7 | 1.2 |
| CR001143 | 58.4 | 4.6 | 1.3 |
| CR001144 | 23.2 | 4.3 | 2.5 |
| CR001145 | 4.9 | 0.1 | 0.0 |
| CR001146 | 38.2 | 0.2 | 0.0 |
| CR001147 | 16.0 | 0.1 | 0.1 |
| CR001148 | 22.3 | 3.0 | 1.6 |
| CR001149 | 19.4 | 6.0 | 3.9 |
| CR001150 | 30.8 | 30.4 | 17.9 |
| CR001151 | 35.8 | 0.8 | 0.2 |
| CR001152 | 24.6 | 0.3 | 0.1 |
| CR001153 | 5.4 | 0.3 | 0.4 |
| CR001154 | 6.3 | 3.6 | 2.1 |
| CR001155 | nd | 2.1 | 0.6 |
| CR001156 | 19.6 | 4.8 | 0.8 |
| CR001157 | 16.4 | 2.7 | 0.6 |
| CR001158 | 36.5 | 5.1 | 3.2 |
| CR001159 | 42.9 | 7.7 | 1.0 |
| CR001160 | 32.5 | 8.5 | 1.9 |
| CR001161 | 20.5 | 10.3 | 1.9 |
| CR001162 | 35.0 | 30.5 | 4.5 |
| CR001163 | 9.9 | 3.3 | 0.5 |
| CR001164 | 23.3 | 14.4 | 8.8 |
| CR001165 | 5.5 | 1.5 | 0.4 |
| CR001166 | 49.8 | 27.1 | 4.4 |
| CR001167 | 13.8 | 6.0 | 0.8 |
| CR001168 | nd | 6.4 | 4.7 |
| CR001169 | 43.9 | n/a | 0.0 |
| CR001170 | 28.5 | 10.7 | 6.4 |
| CR001171 | 37.5 | 2.7 | 2.6 |
| CR001172 | 41.5 | 14.8 | 3.5 |
| CR001173 | 49.5 | 16.7 | 3.9 |
| CR001174 | 36.6 | 4.4 | 0.7 |
| CR001175 | 17.0 | 5.3 | 1.7 |
| CR001176 | 7.7 | 3.6 | 2.8 |
| CR001177 | 4.0 | 4.1 | 2.3 |
| CR001178 | nd | 27.0 | 15.6 |
| CR001179 | 59.0 | 27.9 | 1.5 |
| CR001180 | nd | 8.5 | 5.3 |
| CR001181 | 30.9 | 5.7 | 0.8 |
| CR001182 | 34.5 | 13.6 | 7.8 |
| CR001183 | 6.9 | 0.4 | 0.3 |
| CR001184 | 15.7 | 5.2 | 2.7 |
| CR001185 | 18.2 | 7.6 | 1.2 |
| CR001186 | 12.0 | 5.0 | 0.6 |
| CR001187 | 8.3 | 4.1 | 0.3 |
| CR001188 | 16.8 | 7.1 | 2.0 |
| CR001189 | 13.3 | 3.7 | 1.3 |
| CR001190 | nd | 5.6 | 1.1 |
| CR001191 | 39.5 | 4.8 | 1.0 |
| CR001192 | 27.5 | 3.9 | 1.3 |
| CR001193 | 17.1 | 1.5 | 1.9 |
| CR001194 | 17.8 | 5.9 | 4.1 |
| CR001195 | nd | 16.4 | 9.5 |
| CR001196 | 5.8 | 2.2 | 0.7 |
| CR001197 | 32.4 | 8.1 | 3.1 |
| CR001198 | 28.4 | 18.2 | 5.8 |
| CR001199 | 40.8 | 7.9 | 4.0 |
| CR001200 | 24.4 | 1.2 | 0.7 |
| CR001201 | 1.7 | 0.3 | 0.1 |
| CR001202 | 46.0 | 39.3 | 22.7 |
| CR001203 | 11.9 | 3.1 | 1.6 |
| CR001204 | 1.2 | 0.8 | 0.1 |
| CR001205 | 3.0 | 0.2 | 0.1 |
| CR001206 | 3.9 | 0.5 | 0.2 |
| CR001207 | 7.6 | 2.4 | 1.2 |
| CR001208 | 5.5 | 1.5 | 0.7 |
| CR001209 | 4.4 | 1.7 | 0.2 |
| CR001210 | 10.8 | 3.9 | 2.5 |
| CR001211 | 6.8 | 3.4 | 2.0 |
| CR001212 | 32.7 | 11.1 | 6.5 |
| CR001213 | 21.6 | 6.2 | 1.5 |
| CR001214 | 28.4 | 5.7 | 0.8 |
| CR001215 | 9.0 | 1.5 | 0.5 |
| CR001216 | nd | 2.5 | 1.4 |
| CR001217 | nd | n/a | 0.0 |
| CR001218 | 7.7 | 4.1 | 1.0 |
| CR001219 | 40.0 | 20.3 | 0.6 |
| CR001220 | 33.8 | n/a | 0.0 |
| CR001221 | 41.3 | n/a | 0.0 |
| CR001222 | 39.1 | 18.9 | 10.9 |
| CR001223 | 35.9 | n/a | 0.0 |
| CR001224 | 34.9 | 16.5 | 7.1 |
| CR001225 | 55.0 | 24.6 | 1.1 |
| CR001226 | 34.1 | 4.7 | 4.1 |
| CR001227 | 46.4 | 6.4 | 0.6 |
| CR003027 | 50.2 | 4.5 | nd |
| CR003028 | 3.0 | 2.2 | nd |
| CR003029 | 14.4 | 3.4 | nd |
| CR003030 | 20.2 | 5.8 | nd |
| CR003031 | 31.3 | 9.7 | nd |
| CR003032 | 15.1 | 4.4 | nd |
| CR003033 | 46.5 | 25.2 | nd |
| CR003034 | 55.2 | 11.8 | nd |
| CR003035 | 42.4 | 15.9 | nd |
| CR003036 | 17.4 | 6.1 | nd |
| CR003037 | 38.6 | 19.6 | nd |
| CR003038 | 47.1 | 24.6 | nd |
| CR003039 | 53.8 | 21.1 | nd |
| CR003040 | 35.9 | 6.1 | nd |
| CR003041 | 23.7 | 9.9 | nd |
| CR003042 | 35.5 | 8.7 | nd |
| CR003043 | 24.4 | 4.3 | nd |
| CR003044 | 54.1 | 16.2 | nd |
| CR003045 | 33.7 | 6.6 | nd |
| CR003046 | 34.8 | 3.6 | nd |
| CR003047 | 46.9 | 9.8 | nd |
| CR003048 | 12.6 | 1.7 | nd |
| CR003049 | 24.4 | 4.9 | nd |
| CR003050 | 19.6 | 2.9 | nd |
| CR003051 | 15.4 | 1.8 | nd |
| CR003052 | 15.7 | 7.8 | nd |
| CR003053 | 10.8 | 0.9 | nd |
| CR003054 | 16.7 | 2.9 | nd |
| CR003055 | 17.3 | 4.4 | nd |
| CR003056 | 46.3 | 19.3 | nd |
| CR003057 | 40.9 | 11.3 | nd |
| CR003058 | 40.0 | 8.9 | nd |
| CR003059 | 23.7 | <2% | nd |
| CR003060 | 16.8 | <2% | nd |
| CR003061 | 27.6 | <2% | nd |
| CR003062 | 3.9 | <2% | nd |
| CR003063 | 19.8 | 2.5 | nd |
| CR003064 | 19.6 | <2% | nd |
| CR003065 | 42.3 | 0.1 | nd |
| CR003066 | 36.5 | 0.0 | nd |
| CR003067 | 53.1 | 0.1 | nd |
| CR003068 | 11.5 | <2% | nd |
| CR003069 | 42.7 | 0.0 | nd |
| CR003070 | 49.0 | 0.1 | nd |
| CR003071 | 41.8 | <2% | nd |
| CR003072 | 27.2 | <2% | nd |
| CR003073 | 45.1 | 0.1 | nd |
| CR003074 | 40.2 | 0.1 | nd |
| CR003075 | 58.5 | 0.1 | nd |
| CR003076 | 28.5 | <2% | nd |
| CR003077 | 44.9 | 0.0 | nd |
| CR003078 | 43.9 | <2% | nd |
| CR003079 | 31.1 | <2% | nd |
| CR003080 | 41.1 | <2% | nd |
| CR003081 | 29.4 | <2% | nd |
| CR003082 | 30.8 | <2% | nd |
| CR003083 | 26.5 | 0.0 | nd |
| CR003084 | 32.3 | <2% | nd |
| CR003085 | 24.0 | 0.1 | nd |
| CR003086 | 40.8 | 10.8 | nd |
| CR003087 | 51.0 | 45.0 | nd |
| CR003088 | 25.5 | 9.7 | nd |
| CR003089 | 26.0 | 11.5 | nd |
| CR003090 | 15.2 | <2% | nd |
| CR003091 | 26.4 | 5.5 | nd |
| CR003092 | 4.9 | 2.1 | nd |
| CR003093 | 16.7 | 2.9 | nd |
| CR003094 | 39.5 | 4.7 | nd |
| CR003095 | 12.0 | 1.7 | nd |
| CR003096 | 22.9 | 4.0 | nd |

n/a = not assayed;
nd = not determined

### Genome Editing at the BCL11a Enhancer Site

[0703] Synthetic sgRNA molecules containing targeting domains specific for genomic DNA within the +58 or +62 erythroid enhancer region of BCL11a were ordered. FIG. 5 shows the genomic DNA targeted by the sgRNAs, which were named sgEH1 through sgEH9.

sgEH1 Targeting Domain (CR00276):

(SEQ ID NO: 212)

AUCACAUAUAGGCACCUAUC
sgEH2 Targeting Domain (CR00275):

(SEQ ID NO: 211)

CACAGUAGCUGGUACCUGAU
sgEH8 Targeting Domain (CR00273):

(SEQ ID NO: 209)

CAGGUACCAGCUACUGUGUU
sgEH9 (CR00277) Targeting Domain:

(SEQ ID NO: 213)

UGAUAGGUGCCUAUAUGUGA

[0704] RNPs containing sgEH[X] precomplexed with Cas9 were introduced into CD34+ bone marrow cells (Bone Marrow CD34+ cells ordered from Lonza, Cat #2M-101C, Lot#466977, 30y, F, B (96.8%)) using electroporation (NEON electroporator). Cutting was determined in CD34+ stem cells using T7E1 and NGS. The results are summarized in FIG. 6A-D, which shows overall indel formation across four experiments (two experiments from two different donors), as well as the top indel patterns. sgEH1, 2 and 9 were able to direct cutting with high efficiency.

[0705] It was surprisingly found that across multiple experiments, including those using cells from different donors, the indel pattern remained constant (See FIG. 6A-D). That is, each gRNA gave a consistent pattern of indel formation. As well, deletions appeared to correlate with regions of microhomology near the cutting site.

[0706] To further investigate this phenomenon, gRNAs to the BCL11a locus were designed at tested using different biological samples as well as different delivery methods, and gRNA scaffolds. For this experiment, gRNAs with the following targeting domains were used:

G7 (also referred to as g7) Targeting domain:
GUGCCAGAUGAACUUCCCAU
(e.g., the 3′ 20 nt of SEQ ID NO: 1191)
G8 (also referred to as g8) Targeting domain:
CACAAACGGAAACAAUGCAA
(e.g., the 3′ 20 nt of SEQ ID NO: 1186)

[0707] In a first experiment, g7 and g8 were tested across two different biological samples. As shown in FIG. 7, the pattern of top 3 most prevalent indels for each gRNA was identical. Next, gRNA molecules comprising the G7 and G8 targeting domains were tested with a different tracrRNA component. In the previous experiments, SEQ ID NO: 6601, followed by -UUUU, was directly appended to the gRNA targeting domain to form the sgRNA. In the next set of experiments, SEQ ID NO: 6604, followed by -UUUU, was directly appended to the gRNA targeting domains of g7 and g8 to create sgRNA molecules with a different scaffold (gRNAs called g7BC or g8BC). As shown in FIG. 8, the indel pattern remained constant even when different sgRNA scaffolds are used. Finally, the indel pattern was compared using different delivery methods. Delivery of g7 to 293 cells via either RNP electroporation or by delivery of a g7-encoding plasmid via lipofectamine 2000 was investigated and the results reported in FIG. 9. As shown, the indel pattern remained the same.

[0708] Together, these results strongly suggest that indel pattern formation is sequence-dependent. gRNA molecules that target sequences where cutting results in large deletions and/or frameshift deletions may be beneficial for loss of function.

Excision with Multiple Guides

[0709] G7 and g8, above, target genomic DNA at proximal sites (PAM sequences are within 50 nucleotides of each other within the BCL11a gene). To investigate the effect of simultaneously targeting two proximal sites, CD34+ cells were transfected with RNPs comprising gRNAs with the targeting domain of G7 as well as RNPs comprising gRNAs with the targeting domain of G8. Cutting efficiency and indel pattern was assessed by NGS. As shown in FIG. 10, the primary indel is a delection of the nucleotides between the two gRNA binding sites. These results demonstrate that a plurality, e.g., 2, guides that bind in proximity may be used to effect an excision of the DNA located between the two binding sites.

### Genome Editing in CD34+ Stem Cells

[0710] Genome editing at the BCL11a locus was demonstrated in CD34+ primary hematopoietic stem cells. Briefly, CD34+ cells were isolated from G-CSF mobilized peripheral blood from adult donors (AllCells) using immunoselection (Miltenyi) according to the manufacturer's instructions. Cell gating is shown in FIG. 3. Cells were aliquotted and cryopreserved. Thawed cells were seeded at 2×10⁵/ml in SFEM (StemCell Technologies)+1× antibiotic/antimycotic+50 ng/ml each cytokine (TPO, FLT3L, IL6 and SCF)+500 nM compound 4 and cultured for 5 days at 37 C, 5% CO2 in a humidified incubator. Cell concentration after 5 days was 1×10⁶/ml.

[0711] Preincubated RNP complex consisting of 150 ng each Cas9 (Genscript #265425-7) and sgRNA (TriLink, comprising the sgBCL11A_7 Targeting Domain (i.e., the targeting domain of g7): GTGCCAGATGAACTTCCCATGTTTAAGAGCTATGCTGGAAACAGCATAGCAAGTTTAAAT AAGGCTAGTCCGTTATCAACTTGAAAAAGTGGCACCGAGTCGGTGCTTTT) (SEQ ID NO: 2000) was added to 2×10⁵ cells and electroporated on the Neon system (Lifetechnologies) with pulse parameters: 1600 V, 20 ms, 1 pulse, according to manufacturer's protocols. Duplicate electroporation were performed. Mock electroporation were also performed in the absence of RNP complex. After electroporation, cells were seeded into 1 ml media to recover overnight.

[0712] The day following electroporation, 1/20 of the unsorted culture was seeded in SFEM (StemCell Technologies)+1× antibiotic/antimycotic+50 ng/ml each TPO, FLT3L, IL6, SCF, IL3 and GCSF for 6 days. The remaining cells were stained with antibodies to human CD34 and human CD90 and sorted by flow cytometry for CD34+CD90+ and CD34+CD90− populations. CD34+CD90+ cells are known to contain hematopoietic stem cells, as defined by long-term multi-lineage engraftment in immunodeficient mice (see Majeti et al. 2007 Cell Stem Cell 1, 635-645). Cell populations selected for sorting are indicated by the gates in the representative dot plot of FIG. 3. Sorted cells were cultured in SFEM (StemCell Technologies)+1× antibiotic/antimycotic+50 ng/ml each TPO, FLT3L, IL6, SCF, IL3 and GCSF for 6 days, at which point all cultures were harvested for analysis of genome editing.

[0713] Genomic DNA was purified from harvested cells and the targeted region was amplified with the following primers: BCL11A-7 F, gcttggctacagcacctctga; BCL11A-7 R, ggcatggggttgagatgtgct. PCR product was denatured and reannealed, followed by incubation with T7E1 (New England Biolabs) as per the manufacturer's recommendations. The reaction was then analyzed by agarose gel electrophoresis (FIG. 4). The upper band represents uncleaved homoduplex DNA and the lower bands indicate cleavage products resulting from heteroduplex DNA. The far left lane is a DNA ladder. Band intensity was calculated by peak integration of unprocessed images by ImageJ software. % gene modification (indel) was calculated as follows: % gene modification=100×(1−(1−fraction cleaved)^{1/2}), and is indicated below each corresponding lane of the gel.

[0714] The results are shown in FIG. 4. Gene editing efficiency in the hematopoietic stem cell-containing CD34+CD90+ population was equivalent to CD34+CD90− cells or unsorted. These experiments demonstrate that gene editing can be accomplished in CD34+ HSPCs and CD34+CD90+ cells that are further enriched in HSCs.

### Example 3. BCL11A Erythroid Enhancer Editing in Hematopoietic Stem and Progenitor Cells (HSPCs) Using CRISPR-Cas9 for Derepression of Fetal Globin Expression in Adult Erythroid Cells

### Methods:

[0715] Human CD34⁺ cell culture. Human bone marrow CD34⁺ cells were purchased from either AllCells (Cat#: ABM017F) or Lonza (Cat#: 2M-101C) and expanded for 2 to 3 days using StemSpan SFEM (StemCell Technologies; Cat no. 09650) supplemented with 50 ng/mL of thrombopoietin (Tpo, Peprotech; Cat#300-18), 50 ng/mL of human Flt3 ligand (Flt-3L, Peprotech; Cat#300-19), 50 ng/mL of human stem cell factor (SCF, Peprotech; Cat#300-07), human interleukin-6 (IL-6, Peprotech; Cat#200-06), 1% L-glutamine; 2% penicillin/streptomycin, and Compound 4 (0.75 μM). After 2 to 3 days of expansion, the culture had expanded 2- to 3-fold relative to starting cell numbers purchased from AllCells and 1- to 1.5-fold from Lonza. These culture conditions were used for all CD34+ expansion steps, including both before and after introduction of the CRISPR/Cas systems as described herein.

[0716] Assembly of Cas9 and guide RNA ribonucleoprotein (RNP) complexes, preparation of HSC, and electroporation of RNP into HSC. Cas9-guide RNA ribonucleoprotein complexes (RNPs) were prepared immediately prior to electroporation. For formation of RNP using dual guide RNAs (dgRNAs), 3 μg of each of crRNA (in 2.24 μL) and tracr (in 1.25 μL) are first denatured at 95° C. for 2 min in separate tubes and then cooled to room temperature. For preparation of Cas9 protein, 7.3 μg of CAS9 protein (in 1.21 μL) was mixed with 0.52 μL of 5×CCE buffer (20 mM HEPES, 100 mM KCL, 5 mM MgCL2, 5% Glycerol and freshly added 1 mM DTT). Tracr was first mixed with the Cas9 preparation and incubated at 37° C. for 5 min. The crRNA was then added to Tracr/CAS9 complexes and incubated for 5 min at 37° C. The HSC were collected by centrifugation at 200×g for 15 min and resuspended in T buffer that comes with Neon electroporation kit (Invitrogen; Cat#: MPK1096) at a cell density of 2×10⁷/mL. The RNP mixed with 12 μL of cells by pipetting up and down 3 times gently. To prepare single guide RNA (sgRNA) and Cas9 complexes, 2.25 μg sgRNA (in 1.5 μL) was mixed with 2.25 μg Cas9 protein (in 3 μL) and incubated at RT for 5 min. The sgRNA/Cas9 complex was then mixed with 10.5 μL of 2×10⁷/mL cells by pipetting up and down several times gently and incubated at RT for 2 min. The RNP/cell mixture (10 μL) was transferred into Neon electroporation probe. The electroporation was performed with Neon transfection system (Invitrogen; MPK5000S) using 1700 volts/20 milliseconds and 1 pulse. After electroporation, the cells were transferred into 0.5 mL pre-warmed StemSpan SFEM medium supplemented with growth factors and cytokines as described above and cultured at 37° C. for 2 days.

[0717] Genomic DNA preparation. Genomic DNA was prepared from edited and unedited HSC at 48 hours post-electroporation. The cells were lysed in 10 mM Tris-HCL, pH 8.0; 0.05% SDS and freshly added Protease K of 25 μg/mL and incubated at 37° C. for 1 hour followed by additional incubation at 85° C. for 15 min to inactivate protease K.

[0718] T7E1 assay. To determine editing efficiency of HSCs, T7E1 and assay was performed. PCR was performed using Phusion Hot Start II High-Fidelity kit (Thermo Scientific; Cat#: F-549L) with the following cycling condition: 98° C. for 30″; 35 cycles of 98° C. for 5″, 68° C. for 20′, 72° C. for 30″; 72° C. for 5 min. The following primers were used: forward primer: 5′-AGCTCCAAACTCTCAAACCACAGGG-3′ (SEQ ID NO: 2001) and reverse primer: 5′-TACAATTTTGGGAGTCCACACGGCA-3′ (SEQ ID NO: 2002). The PCR products were denatured and re-annealed using the following condition: 95° C. for 5 min, 95-85° C. at −2° C./s, 85-25° C. at −0.1° C./s, 4° C. hold. After annealing, 1 μL of mismatch-sensitive T7 E1 nuclease (NEB, Cat# M0302L) was added into 10 μL of PCR product above and further incubated at 37° C. for 15 min for digestion of hetero duplexes, and the resulting DNA fragments were analyzed by agarose gel (2%) electrophoresis. The editing efficiency was quantified using ImageJ software (http://rsb.info.nih.gov/ij/).

[0719] Next generation sequencing (NGS). To determine editing efficiency more precisely and patterns of insertions and deletions (indels), the PCR products were subjected to next generation sequencing (NGS). The PCR were performed in duplicate using Titanium Taq PCR kit (Clontech Laboratories; Cat#: 639210) with the following cycling condition: 98° C. for 5 min; 30 cycles of 95° C. for 15 seconds, 68° C. for 15 seconds, 72° C. 1 min; 72° C. for 7 min. The following primers were used: forward primer: 5′-AGCTCCAAACTCTCAAACCACAGGG-3′ (SEQ ID NO: 2001) and reverse primer: 5′-TACAATTTTGGGAGTCCACACGGCA-3′ (SEQ ID NO: 2002). The PCR products were analyzed by 2% agarose gel electrophoresis and submitted for deep sequencing.

[0720] Flow cytometry analysis of HSPC culture. The HSPC were subjected to flow cytometry to characterize stem and progenitor cell populations. The percentage of CD34⁺, CD34⁺CD90⁺ cell subsets, prior to and after genome editing was determined on aliquots of the cell cultures. The cells were incubated with anti-CD34 (BD Biosciences, Cat#555824), anti-CD90 (Biolegend, Cat#328109) in staining buffer, containing PBS supplemented with 0.5% BSA, at 4° C., in dark for 30 min. The cell viability is determined by 7AAD. The cells were washed with staining buffer and Multicolor FACS analysis was performed on a FACSCanto (Becton Dickinson). Flow cytometry results analyzed using Flowjo and the data were presented as percent CD34⁺, CD34⁺CD90⁺ of the total cell population. Absolute numbers of each cell type population in the culture were calculated from the total number of cells multiplied by the percentage of each population.

[0721] In vitro erythropoiesis and FACS analysis for HbF containing erythroid cells. The genome edited HSC were subjected to in vitro erythroid differentiation 48 hours post-electroporation. Briefly, the edited HSC were cultured in erythroid differentiation medium (EDM) consisting of IMDM (Invitrogen, Cat#31980-097) supplemented with 330 μg/mL human holo-transferrin (Sigma, Cat# T0665), 10 μg/mL recombinant human insulin (Sigma, Cat#13536), 2 IU/mL heparin (Sigma, Cat # H3149), 5% human plasma (Sigma, Cat# P9523), 3 IU/mL human erythropoietin (R&D, Cat#287-TC), 1% L-glutamine, and 2% penicillin/streptomycin. During days 0-7 of culture, EDM was further supplemented with 10⁻⁶M hydrocortisone (Sigma, Cat# H0888), 100 ng/mL human SCF (Peprotech, Cat#300-07), and 5 ng/mL human IL-3 (Peprotech, Cat#200-03) for 7-days. During days 7-11 of culture, EDM was supplemented with 100 ng/mL of human SCF only. During days 11-21 of culture, EDM has no additional supplements. On days 7, 14 and 21 of the culture, the cells (2-10×10⁵) were analyzed by intracellular staining for HbF expression. Briefly, the cells were collected by centrifugation at 350×g for 5 min and washed once with staining buffer (Biolegend, Cat#420201). The cells were then fixed with 0.5 mL of fixation buffer (Biolegend, Cat#420801) and washed three times with 2 mL of 1× intracellular staining permeabilization wash buffer (Biolegend, Cat#421002) by centrifugation at 350×g for 5 min. The cells were then incubated with 5 μL of anti-HbF antibody (Life technologies, Cat# MHFH01) in 100 μL of 1× intracellular staining perm wash buffer for 20 min at room temperature. The cells were washed twice with 2 mL of 1× intracellular staining Perm wash buffer and resuspend in 200 μL staining buffer and analyzed on FACS Canto (Becton Dickinson) for HbF expression. The results analyzed using Flowjo and data were presented as % of HbF positive cells (F-cells) in total cell population.

[0722] Gene expression assays. ˜1×10⁶ cells were used to purify RNA using RNeasy mini kit (Qiagen. Cat#74104). 200 to 400 ng RNA was used for 1^{st} strand synthesize using qScript cDNA synthesis kit (Quanta, Cat#95047-500). Taq-man PCR was performed using Taq-Man Fast Advance PR Mix (Life technologies, Cat#4444963) and GAPDH (Life technologies, ID# Hs02758991_g1), HbB (Life technologies, ID#: Hs00747223_g1), HbG2/HbG1 (Life technologies, ID# Hs00361131_g1) and BCL11A (Life technologies, ID#: Hs01093197_m1) according to suppliers protocol. The relative expression of each gene was normalized to GAPDH expression.

[0723] Colony forming unit cell assay. For colony forming unit (CFU) assay, 300 cells per 1.1 mL Methocult/35 mm dish in duplicate were plated in Methocult H4434 methylcellulose medium containing SCF, GM-CSF, IL-3, and erythropoietin (StemCell Technologies). Pen/Strep was added into the Methocult. The culture dishes were incubated in a humidified incubator at 37° C. Colonies containing at least 30 cells were counted at day 14 post-plating using StemVision (StemCell Technologies) to take the image of entire plate. The total number of colonies, number of CFU-GEMM (Granulocyte, Erythrocyte, Macrophage, Megakaryocyte), CFU-GM (Granulocyte, Macrophage), CFU-M (Macrophage), CFU-E (erythroid) and BFU-E (Burst-forming unit-erythroid) were then counted StemVision image analyzer software and confirmed by manually using StemVision Colony Marker software.

[0724] In vivo engraftment study. In vivo engraftment studies are conducted under protocol approved by IACUC. A fraction of final culture of genome edited HSC equivalent to 30,000 starting cells are injected intravenously via the tail vein into sub-lethally irradiated (200 cGY) 6- to 8-week old NSG mice. Engraftment is performed within 24 h after irradiation. Engraftment is monitored by flow cytometric analysis of blood collected at 4, 8, and 12 weeks post-infusion using anti-human CD45 and anti-mouse CD45 antibodies. The mice are sacrificed 13 weeks post-transplantation and bone marrow, spleen and thymus collected for analysis by flow cytometry and colony forming cell unit assay. For secondary engraftment, 50% of the bone marrow from each recipient mouse is transplanted into one secondary sub-lethally irradiated NSG mouse. Engraftment is monitored by flow cytometric analysis of blood collected at 4, 8, and 12 weeks post-infusion using panleukocyte marker, CD45 using anti-human CD45 and anti-mouse CD45 antibodies. Fifteen weeks after transplantation, bone marrow and spleen were harvested from the secondary mice and analyzed by flow cytometry and colony forming cell unit assay.

### Results:

[0725] Without being bound by theory, it is believed that targeted genetic disruption of BCL11A erythroid enhancer in HSC will down regulate the expression of BCL11A selectively in erythroid cell lineage and relieve repression of γ-globin expression, allowing production of the red blood cells containing elevated HbF protein, F-cells. The elevated HbF prevents sickling of the red blood cells under deoxygenated conditions and will be therapeutic/curative for the patients of both β-thalassemia and SCD. Autologous hematopoietic stem cell transplantation (HSCT) with ex vivo genome edited HSC from SCD patients was also combined with stem cell expansion enhancing technology, e.g., an aryl hydrocarbon receptor (AHR) inhibitor, e.g., as described in WO2010/059401 (the contents of which are incorporated by reference in their entirety), e.g., Compound 4 to improve ex vivo expansion and increase the dose of gene modified HSC delivered.

[0726] For efficient genome editing via programmable nuclease, Cas9, the successful delivery of guide RNA (gRNA) and Cas9 protein into target cells and tissues is essential. Recent reports demonstrated that Cas9 ribonucleoprotein (RNP) complexes when delivered into target cells by electroporation can accomplish efficient and specific genome editing in several different cell types. Cas9-RNP complexes cleave chromosomal DNA almost immediately after delivery and are degraded rapidly in cells, reducing off-target effects. In contrast, use of plasmid and viral vector systems used to deliver Cas9 results in prolonged expression of the enzyme aggravating off-target effects associated with the system. Additionally, delivery of RNPs into the target cells requires no additional tools which would greatly facilitate translation of genome editing for therapeutic purposes in the clinic. Purified recombinant Cas9 protein and gRNA complexes (RNPs) were delivered into cultured HSPC and an overview experiments used are shown in FIG. 17.

[0727] Recombinant Cas9 protein was purified from Escherichia coli and complexed with synthetic dual gRNAs (dgRNA) that consist of crRNA and tracr or full-length single guide RNA (sgRNA) to generate ribonucleoprotein (RNP) complexes. The list and sequences of gRNAs used in the study are shown in Table 14. The RNP complexes were electroporated into healthy or SCD patient derived bone marrow CD34+ HSPC via electroporation as described under materials and methods. The cells were expanded for 2-days in HSC expansion medium containing Compound 4 prior to the delivery of RNP complexes. Actively dividing cells may facilitate uptake of RNP complexes delivered by electroporation. To facilitate recovery from transfection process, the cells were cultured for two additional days in the modified expansion medium containing compound 4. Viability of the cells 48 hours after electroporation was determined by flow cytometry using 7AAD. The viability was relatively high with >80% of the cells viable (FIG. 18) suggesting that the HSPC tolerated electroporation of the RNP complexes relatively well compared to other methods of Cas9 and gRNA delivery systems reported in the literature.

TABLE 14
List of gRNAs targeting BCL11A erythroid specific enhancer
used in the current study.

| Guide RNA | | | | | |
|---|---|---|---|---|---|
| targeting | Region/ | dgRNA | sgRNA | | |
| domain ID | strand | tested | tested | Target Sequence | Coordinates (hg38) |
| CR000245 | +58/+ | x | | tcagtgagatgagatatcaa | chr2: 60494483-60494502 |
| CR000246 | +58/+ | x | | cagtgagatgagatatcaaa | chr2: 60494484-60494503 |
| CR000260 | +58/− | x | | tgtaactaataaataccagg | chr2: 60494790-60494809 |
| CR001124 | +58/− | x | | ttagggtgggggcgtgggtg | chr2: 60495217-60495236 |
| CR001131 | +58/− | x | | attagggtgggggcgtgggt | chr2: 60495218-60495237 |
| CR000309 | +58/+ | x | X | cacgcccccaccctaatcag | chr2: 60495221-60495240 |
| CR000308 | +58/− | x | X | tctgattagggtgggggcgt | chr2: 60495222-60495241 |
| CR000310 | +58/− | x | X | ttggcctctgattagggtgg | chr2: 60495228-60495247 |
| CR000311 | +58/− | x | X | tttggcctctgattagggtg | chr2: 60495229-60495248 |
| CR000312 | +58/− | x | X | gtttggcctctgattagggt | chr2: 60495230-60495249 |
| CR000313 | +58/− | x | X | ggtttggcctctgattaggg | chr2: 60495231-60495250 |
| CR000314 | +58/− | x | X | aagggtttggcctctgatta | chr2: 60495234-60495253 |
| CR000315 | +58/− | x | X | gaagggtttggcctctgatt | chr2: 60495235-60495254 |
| CR001128/ | +58/+ | | X | atcagaggccaaacccttcc | chr2: 60495236-60495255 |
| sgEH15 | | | | | |
| CR001127/ | +58/− | | X | cacaggctccaggaagggtt | chr2: 60495247-60495266 |
| sgEH14 | | | | | |
| CR001126/ | +58/− | x | X | tttatcacaggctccaggaa | chr2: 60495252-60495271 |
| sgEH13 | | | | | |
| CR001125/ | +58/− | | X | ttttatcacaggctccagga | chr2: 60495253-60495272 |
| sgEH12 | | | | | |
| CR000316/ | +58/− | | X | ttgcttttatcacaggctcc | chr2: 60495257-60495276 |
| sgEH11 | | | | | |
| CR000317/ | +58/− | | | ctaacagttgcttttatcac | chr2: 60495264-60495283 |
| sgEH4 | | | | | |

[0728] The T7E1 assay is a convenient method to assess editing at specific sites in the genome. The genomic DNA was extracted from the HSPC 2-days post-electroporation. The targeted BCL11A erythroid enhancer region was amplified by polymerase chain reaction (PCR). The PCR products were subjected to T7E1 assay. The end products of T7E1 assay were subjected to 2% agarose gel electrophoresis and the percent edited alleles quantified by imageJ (http://rsb.info.nih.gov/ij/). Expected PCR product sizes and approximate expected sizes of T7E1-digested fragments are shown in FIG. 19. The total editing frequencies are indicated as percentage of total edits below the agarose gel image. The genome editing at the BCL11A locus was observed in the cells treated with BCL11A Cas9 RNPs but not in mock electroporated control cells (FIG. 19).

[0729] The genomic PCR products of the +58 erythroid enhancer region of BCL11A were also subjected to next generation sequencing (NGS). The NGS facilitates simultaneous monitoring of a large number of samples giving a global view of the alleles. Moreover, it provides information on the heterogeneity of insertions and deletions (indels). The sequences were compared with the sequences from control (mock) treated cells. The results of sequence analysis showed that CRISPR-Cas9 induced double stranded breaks were repaired by NHEJ resulting in variable frequencies of small deletions and insertions (indels) near Cas9 cleavage site located in +58 BCL11A erythroid enhancer region (FIG. 20 and Table 15). Overall, the observed editing efficiencies was higher for sgRNAs compared to dgRNAs targeting the same sequence, with 12 out 14 sgRNA producing editing at more than 50% alleles (FIG. 20 and Table 15), though (without being bound by theory) the differences in efficiency between sgRNA and dgRNA may be affected by the source of the materials.

TABLE 15
Genotypes identified by NGS in HSPCs edited with Cas9-RNP. The nucleotide sequence
for each population is given. The target sequence targeted by each gRNA is indicated
above each indel population, with the PAM sequences indicated in lower case. Dashes
denote deleted bases and lowercase letters denote insertions. In the description of the
gRNA, dgRNA refers to dual gRNA molecules comprising the indicated targeting domain
sgRNA indicates single gRNA molecules comprising the indicated targeting domain.
Where multiple experiments were run with the same dgRNA or sgRNA, successive
experiments are labeled “dgRNA,” “d1gRNA”, “d2gRNA,” etc.

| | | % | Indel |
|---|---|---|---|
| gRNA | Variant | Allele | length |
| | CTAACAGTTGCTTTTATCACagg | | |
| CR00317- | TAGTGCAAGCTAACAG---------------GCTCCAGGAAGGGTTTGGCCTCTGATTAG | 5.96% | −15 |
| dgRNA | | | |
| CR00317- | TAGTGCAAGCTAACAGTTGCTTTTATtCACAGGCTCCAGGAAGGGTTTGGCCTCTGATTAG | 5.77% | 1 |
| dgRNA | | | |
| CR00317- | TAGTGCAAGCTAACAGTTGCT-------------CCAGGAAGGGTTTGGCCTCTGATTAG | 4.69% | −13 |
| dgRNA | | | |
| CR00317- | TAGTGCAAGCTAACAGTTGCTTTTATCA--GGCTCCAGGAAGGGTTTGGCCTCTGATTAG | 0.90% | −2 |
| dgRNA | | | |
| CR00317- | TAGTGCAAGCTAACAGTTGCTTTTA-CACAGGCTCCAGGAAGGGTTTGGCCTCTGATTAG | 0.88% | −1 |
| dgRNA | | | |
| CR00317- | TAGTGCAAGCTAACAGTTGCTTTT--CACAGGCTCCAGGAAGGGTTTGGCCTCTGATTAG | 0.77% | −2 |
| dgRNA | | | |
| CR00317- | TAGTGCAAGCT-----------------------CCAGGAAGGGTTTGGCCTCTGATTAG | 0.67% | −23 |
| dgRNA | | | |
| | ATCAGAGGCCAAACCCTTCCacc | | |
| CR001128- | AGCTAACAGTTGCTTTTATCACAGGCTCCAGGA-GGGTTTGGCCTCTGATTAGGGTGGGG | 20.07% | −1 |
| dgRNA | | | |
| CR001128- | AGCTAACAGTTGCTTTTATCACAGGCTCCAGG-----TTTGGCCTCTGATTAGGGTGGGG | 5.00% | −5 |
| dgRNA | | | |
| CR001128- | AGCTAACAGTTGCTTTTATCACAGGCTCCAGGAAaGGGTTTGGCCTCTGATTAGGGTGGGG | 4.84% | 1 |
| dgRNA | | | |
| CR001128- | AGCTAACAGTTGCTTTTATCACAGGCTCCAGG----GTTTGGCCTCTGATTAGGGTGGGG | 4.01% | −4 |
| dgRNA | | | |
| CR001128- | AGCTAACAGTTGCTTTTATCACAGGCTCCAGGA--GGTTTGGCCTCTGATTAGGGTGGGG | 2.99% | −2 |
| dgRNA | | | |
| CR001128- | AGCTAACAGTTGCTTTTATCACAGGCTCCAGGA-GGGTTTGGCCTCTGATTAGGGTGGGG | 23.33% | −1 |
| sgRNA | | | |
| CR001128- | AGCTAACAGTTGCTTTTATCACAGGCTCCAGGAAGG-TTTGGCCTCTGATTAGGGTGGGG | 5.77% | −1 |
| sgRNA | | | |
| CR001128- | AGCTAACAGTTGCTTTTATCACAGGCTCCAGGAAaGGGTTTGGCCTCTGATTAGGGTGGGG | 5.77% | 1 |
| sgRNA | | | |
| CR001128- | AGCTAACAGTTGCTTTTATCACAGGCTCCAGGA--GGTTTGGCCTCTGATTAGGGTGGGG | 5.37% | −2 |
| sgRNA | | | |
| CR001128- | AGCTAACAGTTGCTTTTATCACAGGCTCCAGGAAG--TTTGGCCTCTGATTAGGGTGGGG | 3.70% | −2 |
| sgRNA | | | |
| CR001128- | AGCTAACAGTTGCTTTTATCACAGGCTCCAGG----------CCTCTGATTAGGGTGGGG | 3.62% | −10 |
| sgRNA | | | |
| CR001128- | AGCTAACAGTTGCTTTTATCACAGGC-----------------CTCTGATTAGGGTGGGG | 3.54% | −17 |
| sgRNA | | | |
| CR001128- | AGCTAACAGTTGCTTTTATCACAGGCTCCAGGA---GTTTGGCCTCTGATTAGGGTGGGG | 2.97% | −3 |
| sgRNA | | | |
| | TTGCTTTTATCACAGGCTCCagg | | |
| CR00316- | AGCTAACAGTTGCTTTTATCACAGG-------AAGGGTTTGGCCTCTGATTAGGGTGGGG | 16.03% | −7 |
| sgRNA | | | |
| CR00316- | AGCTAACAGTTGCTTTTATCACAGGCTtCCAGGAAGGGTTTGGCCTCTGATTAGGGTGGGG | 8.25% | 1 |
| sgRNA | | | |
| CR00316- | AGCTAACAGTTGCTTTTATC--------CAGGAAGGGTTTGGCCTCTGATTAGGGTGGGG | 8.04% | −8 |
| sgRNA | | | |
| CR00316- | AGCTAACAGTTGCTTTTATCACAGGCcTCCAGGAAGGGTTTGGCCTCTGATTAGGGTGGGG | 4.07% | 1 |
| sgRNA | | | |
| CR00316- | AGCTAACAGTTGCTTTTATCACAGGC-CCAGGAAGGGTTTGGCCTCTGATTAGGGTGGGG | 3.55% | −1 |
| sgRNA | | | |
| CR00316- | AGCTAACAGTTGCTTTTATCACAGGC--CAGGAAGGGTTTGGCCTCTGATTAGGGTGGGG | 2.37% | −2 |
| sgRNA | | | |
| CR00316- | AGCTAACAGTTGCTTTTATCACAGG-------AAGGGTTTGGCCTCTGATTAGGGTGGGG | 2.49% | −7 |
| dgRNA | | | |
| CR00316- | AGCTAACAGTTGCTTTTATCACAGGCTtCCAGGAAGGGTTTGGCCTCTGATTAGGGTGGGG | 1.78% | 1 |
| dgRNA | | | |
| CR00316- | AGCTAACAGTTGCTTTTATC--------CAGGAAGGGTTTGGCCTCTGATTAGGGTGGGG | 1.32% | −8 |
| dgRNA | | | |
| CR00316- | AGCTAACAGTTGCTTTTATCACAGGCcTCCAGGAAGGGTTTGGCCTCTGATTAGGGTGGGG | 1.26% | 1 |
| dgRNA | | | |
| CR00316- | AGCTAACAGTTGCTTTTATCACAGG-------AAGGGTTTGGCCTCTGATTAGGGTGGGG | 6.94% | −7 |
| d1gRNA | | | |
| CR00316- | AGCTAACAGTTGCTTTTATC--------CAGGAAGGGTTTGGCCTCTGATTAGGGTGGGG | 4.99% | −8 |
| d1gRNA | | | |
| CR00316- | AGCTAACAGTTGCTTTTATCACAGGCTtCCAGGAAGGGTTTGGCCTCTGATTAGGGTGGGG | 4.69% | 1 |
| d1gRNA | | | |
| CR00316- | AGCTAACAGT-------------------------------------GATTAGGGTGGGG | 2.90% | −37 |
| d1gRNA | | | |
| CR00316- | AGCTAACAGTTGCTTTTATCACAGGC-CCAGGAAGGGTTTGGCCTCTGATTAGGGTGGGG | 1.54% | −1 |
| d1gRNA | | | |
| CR00316- | AGCTAACAGTTGCTTTTATCACAGG-------AAGGGTTTGGCCTCTGATTAGGGTGGGG | 11.64% | −7 |
| d2gRNA | | | |
| CR00316- | AGCTAACAGTTGCTTTTATC--------CAGGAAGGGTTTGGCCTCTGATTAGGGTGGGG | 6.04% | −8 |
| d2gRNA | | | |
| CR00316- | AGCTAACAGTTGCTTTTATCACAGGCTtCCAGGAAGGGTTTGGCCTCTGATTAGGGTGGGG | 5.40% | 1 |
| d2gRNA | | | |
| CR00316- | AGCTAACAGTTGCTTTTATCACAGGCcTCCAGGAAGGGTTTGGCCTCTGATTAGGGTGGGG | 1.80% | 1 |
| d2gRNA | | | |
| CR00316- | AGCTAACAGTTGCTTTTATCACAGGC-----GAAGGGTTTGGCCTCTGATTAGGGTGGGG | 1.43% | −5 |
| d2gRNA | | | |
| | TTTTATCACAGGCTCCAGGAagg | | |
| CR001125- | AACAGTTGCTTTTATCACAGGCTCCAaGGAAGGGTTTGGCCTCTGATTAGGGTGGGGGCGT | 13.50% | 1 |
| dgRNA | | | |
| CR001125- | AACAGTTGCTTTTATCACAGGC-----------------CTCTGATTAGGGTGGGGGCGT | 1.82% | −17 |
| dgRNA | | | |
| CR001125- | AACAGTTGCTTTTATCACAGG-----------GTTTGGCCTCTGATTAGGGTGGGGGCGT | 1.76% | −11 |
| dgRNA | | | |
| CR001125- | AACAGTTGCTTTTATCACAGG-------AAGGGTTTGGCCTCTGATTAGGGTGGGGGCGT | 1.59% | −7 |
| dgRNA | | | |
| CR001125- | AACAGTTGCTTTT------------------------------------GGTGGGGGCGT | 1.33% | −36 |
| dgRNA | | | |
| CR001125- | AACAGTTGCTTTTATCACAGGCTCCAaGGAAGGGTTTGGCCTCTGATTAGGGTGGGGGCGT | 26.27% | 1 |
| sgRNA | | | |
| CR001125- | AACAGTTGCTTTTATCACAGG-----------GTTTGGCCTCTGATTAGGGTGGGGGCGT | 4.64% | −11 |
| sgRNA | | | |
| CR001125- | AACAGTTGCTTTTATCACAGG-------AAGGGTTTGGCCTCTGATTAGGGTGGGGGCGT | 4.11% | −7 |
| sgRNA | | | |
| CR001125- | AACAGTTGCTTTTATCACAGGC-----------------CTCTGATTAGGGTGGGGGCGT | 2.66% | −17 |
| sgRNA | | | |
| CR001125- | AACAGTTGCTTTTATCACAGGCT------------TGGCCTCTGATTAGGGTGGGGGCGT | 2.58% | −12 |
| sgRNA | | | |
| CR001125- | AACAGTTGCTTTTATCACAGGCTCC-GGAAGGGTTTGGCCTCTGATTAGGGTGGGGGCGT | 1.84% | −1 |
| sgRNA | | | |
| | TTTATCACAGGCTCCAGGAAggg | | |
| CR001126- | ACAGTTGCTTTTATCACAGGCTCCAG-AAGGGTTTGGCCTCTGATTAGGGTGGGGGCGTG | 9.38% | −1 |
| dgRNA | | | |
| CR001126- | ACAGTTGCTTTTATCACAGG-----------GTTTGGCCTCTGATTAGGGTGGGGGCGTG | 3.28% | −11 |
| dgRNA | | | |
| CR001126- | ACAGTTGCTTTTATCACAGGCTCCAGGgAAGGGTTTGGCCTCTGATTAGGGTGGGGGCGTG | 2.91% | 1 |
| dgRNA | | | |
| CR001126- | ACAGTTGCTTTTATCACAGGC-----------------CTCTGATTAGGGTGGGGGCGTG | 2.82% | −17 |
| dgRNA | | | |
| CR001126- | ACAGTTGCTTTT---------------------------------------GGGGGCGTG | 1.61% | −39 |
| dgRNA | | | |
| CR001126- | ACAGTTGCTTT----------------------------------------GGGGGCGTG | 1.12% | −40 |
| dgRNA | | | |
| CR001126- | ACAGTTGCTTTTATCACAGGCTCCAG-AAGGGTTTGGCCTCTGATTAGGGTGGGGGCGTG | 12.70% | −1 |
| sgRNA | | | |
| CR001126- | ACAGTTGCTTTTATCACAGG-----------GTTTGGCCTCTGATTAGGGTGGGGGCGTG | 4.37% | −11 |
| sgRNA | | | |
| CR001126- | ACAGTTGCTTTTATCACAGGCTCCAGGgAAGGGTTTGGCCTCTGATTAGGGTGGGGGCGTG | 3.22% | 1 |
| sgRNA | | | |
| CR001126- | ACAGTTGCTTTTATCACAGGCTCCAGaT------------------AAGGTGGGGGCGTG | 2.96% | −18 |
| sgRNA | | | |
| CR001126- | ACAGTTGCTTTTATCACAGGC-----------------CTCTGATTAGGGTGGGGGCGTG | 2.68% | −17 |
| sgRNA | | | |
| CR001126- | ACAGTTGCTTTTATCACAGGCTCCAGG----GTTTGGCCTCTGATTAGGGTGGGGGCGTG | 2.59% | −4 |
| sgRNA | | | |
| CR001126- | ACAGTTGCTTTTATCACAGGCTCCAGcGAAGGGTTTGGCCTCTGATTAGGGTGGGGGCGTG | 1.80% | 1 |
| sgRNA | | | |
| CR001126- | ACAGTTGCTTTTATCACAGGCTCC-GGAAGGGTTTGGCCTCTGATTAGGGTGGGGGCGTG | 1.74% | −1 |
| sgRNA | | | |
| | CACAGGCTCCAGGAAGGGTTtgg | | |
| CR001127- | TGCTTTTATCACAGGCTCCAGGAAGG-TTTGGCCTCTGATTAGGGTGGGGGCGTGGGTGG | 4.00% | −1 |
| dgRNA | | | |
| CR001127- | TGCTTTTATCACAGGCcT-----------------------------GGGGCGTGGGTGG | 2.35% | −29 |
| dgRNA | | | |
| CR001127- | TGCTTTTATCACAGGC------------------------------------GTGGGTGG | 2.19% | −36 |
| dgRNA | | | |
| CR001127- | TGCTTTTATCACAGGC-----------------CTCTGATTAGGGTGGGGGCGTGGGTGG | 1.59% | −17 |
| dgRNA | | | |
| CR001127- | TGCTTTTATCACAGGCTCCAGGAAGG------CCTCTGATTAGGGTGGGGGCGTGGGTGG | 1.48% | −6 |
| dgRNA | | | |
| CR001127- | TGCTTTTATCACAGGCTCCAGGA-GGGTTTGGCCTCTGATTAGGGTGGGGGCGTGGGTGG | 23.21% | −1 |
| sgRNA | | | |
| CR001127- | TGCTTTTATCACAGGCTCCAGGAAGG-TTTGGCCTCTGATTAGGGTGGGGGCGTGGGTGG | 6.65% | −1 |
| sgRNA | | | |
| CR001127- | TGCTTTTATCACAGGC-----------------CTCTGATTAGGGTGGGGGCGTGGGTGG | 5.20% | −17 |
| sgRNA | | | |
| CR001127- | TGCTTTTATCACAGGCTCCAGGAAaGGGTTTGGCCTCTGATTAGGGTGGGGGCGTGGGTGG | 4.89% | 1 |
| sgRNA | | | |
| CR001127- | TGCTTTTATCACAGGCTCCAGG----------------------------GCGTGGGTGG | 4.30% | −28 |
| sgRNA | | | |
| CR001127- | TGCTTTTATCACAGGCTCCAGG-----TTTGGCCTCTGATTAGGGTGGGGGCGTGGGTGG | 3.72% | −5 |
| sgRNA | | | |
| CR001127- | TGCTTTTATCACAGGC------------------------------------GTGGGTGG | 3.71% | −36 |
| sgRNA | | | |
| CR001127- | TGCTTTTATCACAGGCTCCAGGAAG--TTTGGCCTCTGATTAGGGTGGGGGCGTGGGTGG | 3.53% | −2 |
| sgRNA | | | |
| CR001127- | TGCTTTTATCACAGGCTCCAGGAAGGtC-----------------CGTTTGCGTGGGTGG | 2.29% | −17 |
| sgRNA | | | |
| | CACGCCCCCACCCTAATCAGagg | | |
| CR00309- | TATCACAGGCTCCAGGAAGGGTTTGGC-------------------GTGGGTGGGGTAGA | 11.56% | −19 |
| sgRNA | | | |
| CR00309- | TATCACAGGCTCCAGGAAGGGTTTGGCCTCTGAaTTAGGGTGGGGGCGTGGGTGGGGTAGA | 7.29% | 1 |
| sgRNA | | | |
| CR00309- | TATCACAGGCTCCAGGAAGGG------------------------CGTGGGTGGGGTAGA | 6.16% | −24 |
| sgRNA | | | |
| CR00309- | TATCACAGGCTCCAGGAAGGG----------------------GGCGTGGGTGGGGTAGA | 4.74% | −22 |
| sgRNA | | | |
| CR00309- | TATCACAGGCTCCAGGAAGGGTTTGG------------------GCGTGGGTGGGGTAGA | 4.34% | −18 |
| sgRNA | | | |
| CR00309- | TATCACAGGCTCCAGGAAGGGTTTGG------------------------GTGGGGTAGA | 3.45% | −24 |
| sgRNA | | | |
| CR00309- | TATCACAGGCTCCAGG---------------------------GGCGTGGGTGGGGTAGA | 1.87% | −27 |
| sgRNA | | | |
| | GAAGGGTTTGGCCTCTGATTagg | | |
| CR00313- | TCCAGGAAGGGTTTGG------------------------GTGGGGTAGAAGAGGACTGG | 3.36% | −24 |
| sgRNA | | | |
| CR00313- | TCCAGGAAGGGTTTGGCCTCTGATTAGG-TGGGGGCGTGGGTGGGGTAGAAGAGGACTGG | 3.31% | −1 |
| sgRNA | | | |
| CR00313- | TCCAGGAAGGGTT-----------------------------GGGGTAGAAGAGGACTGG | 2.83% | −29 |
| sgRNA | | | |
| CR00313- | TCCAGGAAGGGTTTGGCCT-------------------GGGTGGGGTAGAAGAGGACTGG | 2.76% | −19 |
| sgRNA | | | |
| CR00313- | TCCAGGAAGGGTTTGG------------------------------TAGAAGAGGACTGG | 2.31% | −30 |
| sgRNA | | | |
| | GTTTGGCCTCTGATTAGGGTggg | | |
| CR00312- | CCAGGAAGGGTTTGGCCTCTGATTAGG-TGGGGGCGTGGGTGGGGTAGAAGAGGACTGGC | 16.87% | −1 |
| dgRNA | | | |
| CR00312- | CCAGGAAGGGTTTGGC-------------------GTGGGTGGGGTAGAAGAGGACTGGC | 9.86% | −19 |
| dgRNA | | | |
| CR00312- | CCAGGAAGGGTTTGGCCTCTGATT--GGTGGGGGCGTGGGTGGGGTAGAAGAGGACTGGC | 5.65% | −2 |
| dgRNA | | | |
| CR00312- | CCAGGAAGGG------------------------CGTGGGTGGGGTAGAAGAGGACTGGC | 3.83% | −24 |
| dgRNA | | | |
| CR00312- | CCAGGAAGGG----------------------GGCGTGGGTGGGGTAGAAGAGGACTGGC | 3.42% | −22 |
| dgRNA | | | |
| CR00312- | CCAGGAAGGGTTTGG------------------------GTGGGGTAGAAGAGGACTGGC | 2.10% | −24 |
| dgRNA | | | |
| CR00312- | CCAGGAAGGGTTTGGCCTCTGA----GGTGGGGGCGTGGGTGGGGTAGAAGAGGACTGGC | 1.85% | −4 |
| dgRNA | | | |
| CR00312- | CCAGGAAGGGTTTGGCCTCTGATTAGG-TGGGGGCGTGGGTGGGGTAGAAGAGGACTGGC | 13.35% | −1 |
| sgRNA | | | |
| CR00312- | CCAGGAAGGGTTTGGC-------------------GTGGGTGGGGTAGAAGAGGACTGGC | 7.85% | −19 |
| sgRNA | | | |
| CR00312- | CCAGGAAGGGTTTGG------------------------GTGGGGTAGAAGAGGACTGGC | 4.19% | −24 |
| sgRNA | | | |
| CR00312- | CCAGGAAGGGTTTGGCCTCTGATT--GGTGGGGGCGTGGGTGGGGTAGAAGAGGACTGGC | 3.98% | −2 |
| sgRNA | | | |
| CR00312- | CCAGGAAGGGTTTGGCCTCTGATTAGGG-----GCGTGGGTGGGGTAGAAGAGGACTGGC | 2.95% | −5 |
| sgRNA | | | |
| CR00312- | CCAGGAAGGG------------------------CGTGGGTGGGGTAGAAGAGGACTGGC | 2.29% | −24 |
| sgRNA | | | |
| CR00312- | CCAGGAAGGGTTTGGCCTCTGATTAGaGGTGGGGGCGTGGGTGGGGTAGAAGAGGACTGGC | 2.09% | 1 |
| sgRNA | | | |
| CR00312- | CCAGGAAGGGTTTGGCCTCTGATTAGG-TGGGGGCGTGGGTGGGGTAGAAGAGGACTGGC | 19.22% | −1 |
| d1gRNA | | | |
| CR00312- | CCAGGAAGGGTTTGGCCTCTGATT--GGTGGGGGCGTGGGTGGGGTAGAAGAGGACTGGC | 6.28% | −2 |
| d1gRNA | | | |
| CR00312- | CCAGGAAGGGTTTGG------------------------GTGGGGTAGAAGAGGACTGGC | 5.31% | −24 |
| d1gRNA | | | |
| CR00312- | CCAGGAAGGGTTTGGC-------------------GTGGGTGGGGTAGAAGAGGACTGGC | 4.22% | −19 |
| d1gRNA | | | |
| CR00312- | CCAGGAAGGGTTTGG----------------GGGCGTGGGTGGGGTAGAAGAGGACTGGC | 3.10% | −16 |
| d1gRNA | | | |
| CR00312- | CCAGGAAGGGTTTGGCCTCTGATTAG--TGGGGGCGTGGGTGGGGTAGAAGAGGACTGGC | 2.85% | −2 |
| d1gRNA | | | |
| CR00312- | CCAGGAAGGG------------------------CGTGGGTGGGGTAGAAGAGGACTGGC | 2.74% | −24 |
| d1gRNA | | | |
| CR00312- | CCAGGAAGGGTTTGGCCTCTGATTAGG-TGGGGGCGTGGGTGGGGTAGAAGAGGACTGGC | 23.15% | −1 |
| d2gRNA | | | |
| CR00312- | CCAGGAAGGGTTTGGC-------------------GTGGGTGGGGTAGAAGAGGACTGGC | 8.99% | −19 |
| d2gRNA | | | |
| CR00312- | CCAGGAAGGGTTTGGCCTCTGATT--GGTGGGGGCGTGGGTGGGGTAGAAGAGGACTGGC | 6.82% | −2 |
| d2gRNA | | | |
| CR00312- | CCAGGAAGGG-----------------------GCGTGGGTGGGGTAGAAGAGGACTGGC | 2.69% | −23 |
| d2gRNA | | | |
| CR00312- | CCAGGAAGGG------------------------CGTGGGTGGGGTAGAAGAGGACTGGC | 2.29% | −24 |
| d2gRNA | | | |
| CR00312- | CCAGGAAGGGTTTGGCCTCTGATTAG--TGGGGGCGTGGGTGGGGTAGAAGAGGACTGGC | 2.25% | −2 |
| d2gRNA | | | |
| CR00312- | CCAGGAAGGGTTTGG----------------GGGCGTGGGTGGGGTAGAAGAGGACTGGC | 2.13% | −16 |
| d2gRNA | | | |
| | TTTGGCCTCTGATTAGGGTGggg | | |
| CR00311- | CAGGAAGGGTTTGGCCTCTGATTAGG-TGGGGGCGTGGGTGGGGTAGAAGAGGACTGGCA | 19.62% | −1 |
| dgRNA | | | |
| CR00311- | CAGGAAGGGTTTGGC-------------------GTGGGTGGGGTAGAAGAGGACTGGCA | 3.01% | −19 |
| dgRNA | | | |
| CR00311- | CAGGAAGGGTTTGGCCTCTGATTAG--TGGGGGCGTGGGTGGGGTAGAAGAGGACTGGCA | 2.77% | −2 |
| dgRNA | | | |
| CR00311- | CAGGAAGGGTTTGGCCTCTGATTAGGG-----GCGTGGGTGGGGTAGAAGAGGACTGGCA | 2.23% | −5 |
| dgRNA | | | |
| CR00311- | CAGGAAGGGTTTGG------------------------GTGGGGTAGAAGAGGACTGGCA | 2.21% | −24 |
| dgRNA | | | |
| CR00311- | CAGGAAGGGTTTGG-------------TGGGGGCGTGGGTGGGGTAGAAGAGGACTGGCA | 2.05% | −13 |
| dgRNA | | | |
| CR00311- | CAGGAAGGGTTTGGCCTCTG-------TGGGGGCGTGGGTGGGGTAGAAGAGGACTGGCA | 1.88% | −7 |
| dgRNA | | | |
| CR00311- | CAGGAAGGGT------------------------------GGGGTAGAAGAGGACTGGCA | 1.76% | −30 |
| dgRNA | | | |
| CR00311- | CAGGAAGGGTTTGGCCTCTGATTAGG-TGGGGGCGTGGGTGGGGTAGAAGAGGACTGGCA | 28.21% | −1 |
| sgRNA | | | |
| CR00311- | CAGGAAGGGTTTGGC-------------------GTGGGTGGGGTAGAAGAGGACTGGCA | 4.88% | −19 |
| sgRNA | | | |
| CR00311- | CAGGAAGGGT------------------------------GGGGTAGAAGAGGACTGGCA | 2.72% | −30 |
| sgRNA | | | |
| CR00311- | CAGGAAGGGTTTGGCCTCTGATTAG--TGGGGGCGTGGGTGGGGTAGAAGAGGACTGGCA | 2.62% | −2 |
| sgRNA | | | |
| CR00311- | CAGGAAGGGTTTGGCCTCTGATTAGGG----GGCGTGGGTGGGGTAGAAGAGGACTGGCA | 2.35% | −4 |
| sgRNA | | | |
| CR00311- | CAGGAAGGGTTTGGCCTCTGATTAGGG-----GCGTGGGTGGGGTAGAAGAGGACTGGCA | 2.06% | −5 |
| sgRNA | | | |
| CR00311- | CAGGAAGGGTTTGGCCTCTGATTAGG-TGGGGGCGTGGGTGGGGTAGAAGAGGACTGGCA | 31.34% | −1 |
| d1gRNA | | | |
| CR00311- | CAGGAAGGGTTTGGCCTCTGATTAG--TGGGGGCGTGGGTGGGGTAGAAGAGGACTGGCA | 4.00% | −2 |
| d1gRNA | | | |
| CR00311- | CAGGAAGGGTTTGGCCT------------------------------AAGAGGACTGGCA | 2.84% | −30 |
| d1gRNA | | | |
| CR00311- | CAGGAAGGGTTTGG-----------------------------------GAGGACTGGCA | 2.41% | −35 |
| d1gRNA | | | |
| CR00311- | CAGGAAGGGTTT---------------------------------AGAAGAGGACTGGCA | 2.35% | −33 |
| d1gRNA | | | |
| CR00311- | CAGGAAGGGTTTGGCCTC-------------------------------GAGGACTGGCA | 2.11% | −31 |
| d1gRNA | | | |
| CR00311- | CAGGAAGGGTTTGGCCTCTGATTAGGG----GGCGTGGGTGGGGTAGAAGAGGACTGGCA | 2.03% | −4 |
| d1gRNA | | | |
| CR00311- | CAGGAAGGGTTTGGCCTCTGATTAGGG---GGGCGTGGGTGGGGTAGAAGAGGACTGGCA | 1.71% | −3 |
| d1gRNA | | | |
| CR00311- | CAGGAAGGGTTTGGCCTCTGATTAGG-TGGGGGCGTGGGTGGGGTAGAAGAGGACTGGCA | 30.20% | −1 |
| d2gRNA | | | |
| CR00311- | CAGGAAGGGTTTGGC-------------------GTGGGTGGGGTAGAAGAGGACTGGCA | 7.57% | −19 |
| d2gRNA | | | |
| CR00311- | CAGGAAGGGTTTGGCCTCTGATTAG--TGGGGGCGTGGGTGGGGTAGAAGAGGACTGGCA | 3.57% | −2 |
| d2gRNA | | | |
| CR00311- | CAGGAAGGGTTTGG----------------------------GGTAGAAGAGGACTGGCA | 2.39% | −28 |
| d2gRNA | | | |
| CR00311- | CAGGAAGGGTTTGGCCTCTGATTAGGG-----GCGTGGGTGGGGTAGAAGAGGACTGGCA | 2.10% | −5 |
| d2gRNA | | | |
| CR00311- | CAGGAAGGGTTTGGCCTCTGATTAGGG----GGCGTGGGTGGGGTAGAAGAGGACTGGCA | 1.50% | −4 |
| d2gRNA | | | |
| CR00311- | CAGGAAGGGTTTGG----------------GGGCGTGGGTGGGGTAGAAGAGGACTGGCA | 1.49% | −16 |
| d2gRNA | | | |
| | TTGGCCTCTGATTAGGGTGGggg | | |
| CR00310- | AGGAAGGGTTTGGCCTCTGATTAGGG----GGCGTGGGTGGGGTAGAAGAGGACTGGCAG | 7.70% | −4 |
| sgRNA | | | |
| CR00310- | AGGAAGGGTTTGGCCTCTGATTAGGG------CGTGGGTGGGGTAGAAGAGGACTGGCAG | 7.13% | −6 |
| sgRNA | | | |
| CR00310- | AGGAAGGGTTTGGCCTCTGATTAGGG-----GCGTGGGTGGGGTAGAAGAGGACTGGCAG | 6.34% | −5 |
| sgRNA | | | |
| CR00310- | AGGAAGGGTTTGGCCTCTGATTAGG-TGGGGGCGTGGGTGGGGTAGAAGAGGACTGGCAG | 5.38% | −1 |
| sgRNA | | | |
| CR00310- | AGGAAGGGTTTGGCCTCTGATTAG--TGGGGGCGTGGGTGGGGTAGAAGAGGACTGGCAG | 3.73% | −2 |
| sgRNA | | | |
| CR00310- | AGGAAGGGTTTGGCCTCTGATT-----GGGGGCGTGGGTGGGGTAGAAGAGGACTGGCAG | 3.54% | −5 |
| sgRNA | | | |
| CR00310- | AGGAAGGGTTTGGCCTCTGATTAGGGTGGGGGCGTGGGTGGG-TAGAAGAGGACTGGCAG | 0.67% | −1 |
| dgRNA | | | |
| | TCTGATTAGGGTGGGGGCGTggg | | |
| CR00308- | GGTTTGGCCTCTGATTAGGGTGGGG------------TAGAAGAGGACTGGCAGACCTCT | 16.28% | −12 |
| sgRNA | | | |
| CR00308- | GGTTTGGCCTCTGATTAGGGTGGGGG-----------TAGAAGAGGACTGGCAGACCTCT | 5.59% | −11 |
| sgRNA | | | |
| CR00308- | GGTTTGGCCTCTGATTAGGGTGGG--------TGGGGTAGAAGAGGACTGGCAGACCTCT | 4.51% | −8 |
| sgRNA | | | |
| CR00308- | GGTTTGGCCTCTGAT------------------GGGGTAGAAGAGGACTGGCAGACCTCT | 3.54% | −18 |
| sgRNA | | | |
| CR00308- | GGTTTGGCCTCTGATTtA-----------------------------CTGGCAGACCTCT | 2.76% | −29 |
| sgRNA | | | |
| CR00308- | GGTTTGGCCTCTGATTgG-------CCGTGGGTGGGGTAGAAGAGGACTGGCAGACCTCT | 2.27% | −7 |
| sgRNA | | | |
| CR00308- | GGTTTGGCCTCTGATTAGGG----------------GTAGAAGAGGACTGGCAGACCTCT | 2.26% | −16 |
| sgRNA | | | |
| CR00308- | GGTTTGGCCTCTGATcC--AAGAGCCCGTGGGTGGGGTAGAAGAGGACTGGCAGACCTCT | 1.99% | −2 |
| sgRNA | | | |
| CR00308- | GGTTTGGCCTCTGATTAGGGTGGGGGCGTGGGTGGG-TAGAAGAGGACTGGCAGACCTCT | 0.42% | −1 |
| dgRNA | | | |
| | ATTAGGGTGGGGGCGTGGGTggg | | |
| CR001131- | TGGCCTCTGATTAGGGTGGGG------------TAGAAGAGGACTGGCAGACCTCTCCAT | 44.62% | −12 |
| dgRNA | | | |
| CR001131- | TGGCCTCTGATTAGGGTGGGGG-----------TAGAAGAGGACTGGCAGACCTCTCCAT | 3.19% | −11 |
| dgRNA | | | |
| CR001131- | TGGCCTCTGATTAGGGTGGGGGCGTGG-TGGGGTAGAAGAGGACTGGCAGACCTCTCCAT | 1.72% | −1 |
| dgRNA | | | |
| CR001131- | TGGCCTCTGATTAGGGTGGGGGCG------------AAGAGGACTGGCAGACCTCTCCAT | 1.04% | −12 |
| dgRNA | | | |
| | TTAGGGTGGGGGCGTGGGTGggg | | |
| CR001124- | GGCCTCTGATTAGGGTGGGG------------TAGAAGAGGACTGGCAGACCTCTCCATC | 8.52% | −12 |
| dgRNA | | | |
| CR001124- | GGCCTCTGATTAGGGTGGGGGCGTGG-TGGGGTAGAAGAGGACTGGCAGACCTCTCCATC | 2.12% | −1 |
| dgRNA | | | |
| CR001124- | GGCCTCTGATTAGGGTGGGGG-----------TAGAAGAGGACTGGCAGACCTCTCCATC | 1.33% | −11 |
| dgRNA | | | |
| | TGTAACTAATAAATACCagg | | |
| CR00260- | CTGCTGAGGTGTAACTAATAAATACC-GGAGGCAGCATTTTAGTTCACAAGCTCGGAGCA | 26.54% | −1 |
| dgRNA | | | |
| CR00260- | CTGCTGAGGTGTAACTAATAAATAC-AGGAGGCAGCATTTTAGTTCACAAGCTCGGAGCA | 12.39% | −1 |
| dgRNA | | | |
| CR00260- | CTGCTGAGGTGTAACTAATAAATACCcAGGAGGCAGCATTTTAGTTCACAAGCTCGGAGCA | 12.32% | 1 |
| dgRNA | | | |
| CR00260- | CTGCTGAGGTGTAACTAATAAATACC--GAGGCAGCATTTTAGTTCACAAGCTCGGAGCA | 2.37% | −2 |
| dgRNA | | | |
| CR00260- | CTGCTGAGGTGTAACTAATAAAT--CAGGAGGCAGCATTTTAGTTCACAAGCTCGGAGCA | 1.89% | −2 |
| dgRNA | | | |
| CR00260- | CTGCTGAGGTGTAACTAATAAATA---GGAGGCAGCATTTTAGTTCACAAGCTCGGAGCA | 1.28% | −3 |
| dgRNA | | | |
| | CAGTGAGATGAGATATCAAAggg | | |
| CR00246- | GGGAGATGGAATGAACACTTTTCGTCCCCTTTGgATATCTCATCTCACTGAGCTCTGGGCC | 7.56% | 1 |
| dgRNA | | | |
| CR00246- | GGGAGATGGAATGAACACTTTTCGTCCCCTTTGAT--CTCATCTCACTGAGCTCTGGGCC | 4.46% | −2 |
| dgRNA | | | |
| CR00246- | GGGAGATGGAATGAACACTTTTCGTCCCCTTTG------CATCTCACTGAGCTCTGGGCC | 3.50% | −6 |
| dgRNA | | | |
| CR00246- | GGGAGATGGAATGAACACTTTTCGTCCCCTTT-----CTCATCTCACTGAGCTCTGGGCC | 2.98% | −5 |
| dgRNA | | | |
| CR00246- | GGGAGATGGAATGAACACTTTTCGTCCCCTTT-ATATCTCATCTCACTGAGCTCTGGGCC | 2.97% | −1 |
| dgRNA | | | |
| CR00246- | GGGAGATGGAATGAACACTTTTCGTCCCCTTTG---TCTCATCTCACTGAGCTCTGGGCC | 2.96% | −3 |
| dgRNA | | | |
| CR00246- | GGGAGATGGAATGAACACTTTTCGTCCCCTTT--TATCTCATCTCACTGAGCTCTGGGCC | 2.93% | −2 |
| dgRNA | | | |
| CR00246- | GGGAGATGGAATGAACACTTTTCGTCCCCTTTG-TATCTCATCTCACTGAGCTCTGGGCC | 2.70% | −1 |
| dgRNA | | | |
| | TCAGTGAGATGAGATATCAAagg | | |
| CR00245- | GGAGATGGAATGAACACTTTTCGTCCCCTTTGAaTATCTCATCTCACTGAGCTCTGGGCCG | 22.36% | 1 |
| dgRNA | | | |
| CR00245- | GGAGATGGAATGAACACTTTTCGTCCCCTTTGA-ATCTCATCTCACTGAGCTCTGGGCCG | 8.97% | −1 |
| dgRNA | | | |
| CR00245- | GGAGATGGAATGAACACTTTTCGTCCCCTTTGAT--CTCATCTCACTGAGCTCTGGGCCG | 4.03% | −2 |
| dgRNA | | | |
| CR00245- | GGAGATGGAATGAACACTTTTCGTCCCCTTTG-TATCTCATCTCACTGAGCTCTGGGCCG | 2.45% | −1 |
| dgRNA | | | |
| CR00245- | GGAGATGGAATGAACACTTTTCGTCCCCTT--ATATCTCATCTCACTGAGCTCTGGGCCG | 1.85% | −2 |
| dgRNA | | | |
| CR00245- | GGAGATGGAATGAACACTTTTCGTCCCCTTTGA-----CATCTCACTGAGCTCTGGGCCG | 1.38% | −5 |
| dgRNA | | | |
| | GTGCCAGATGAACTTCCCATtgg | | |
| g7BCL11a-BC- | CTGTGGGCAGTGCCAGATGAACTTCC-ATTGGGGGACATTCTTATTTTTATCGAGCACAA | 15.63% | −1 |
| 1sgRNA | | | |
| g7BCL11a-BC- | CTGTGGGCAGTGCCAGATGAACTTC--ATTGGGGGACATTCTTATTTTTATCGAGCACAA | 7.36% | −2 |
| 1sgRNA | | | |
| g7BCL11a-BC- | CTGTGGGCAGTGCCAGATGAACTTCCCcATTGGGGGACATTCTTATTTTTATCGAGCACAA | 6.88% | 1 |
| 1sgRNA | | | |
| g7BCL11a-BC- | CTGTGGGCAGTGCCAGATGAAC-----ATTGGGGGACATTCTTATTTTTATCGAGCACAA | 2.81% | −5 |
| 1sgRNA | | | |
| g7BCL11a-BC- | CTGTGGGCAGTGCCAGATGAACTTCC--TTGGGGGACATTCTTATTTTTATCGAGCACAA | 2.59% | −2 |
| 1sgRNA | | | |
| g7BCL11a-BC- | CTGTGGGCAGTGCCAGATGAACTTCC-ATTGGGGGACATTCTTATTTTTATCGAGCACAA | 18.89% | −1 |
| 2sgRNA | | | |
| g7BCL11a-BC- | CTGTGGGCAGTGCCAGATGAACTTC--ATTGGGGGACATTCTTATTTTTATCGAGCACAA | 9.14% | −2 |
| 2sgRNA | | | |
| g7BCL11a-BC- | CTGTGGGCAGTGCCAGATGAACTTCCCcATTGGGGGACATTCTTATTTTTATCGAGCACAA | 5.52% | 1 |
| 2sgRNA | | | |
| g7BCL11a-BC- | CTGTGGGCAGTGCCAGATGAACTTCC--TTGGGGGACATTCTTATTTTTATCGAGCACAA | 4.39% | −2 |
| 2sgRNA | | | |
| g7BCL11a-BC- | CTGTGGGCAGTGCCAGATGAACT---CATTGGGGGACATTCTTATTTTTATCGAGCACAA | 3.18% | −3 |
| 2sgRNA | | | |

[0730] To determine whether CD34+ HSPC have retained their multilineage potential to differentiate into effector cells after ex vivo manipulations including genome editing, in vitro colony forming cell (CFC) unit assays were performed for select gRNAs. The genome edited cells were suspended in cytokine-supplemented methylcellulose and maintained for 14 days at 37° C. in a humidified atmosphere of 5% CO2. Discrete colonies developed which were classified and counted based on the number and types of mature cells using morphological and phenotypic criteria (STEMvision) that they contain and scored for contribution to colony forming unit-erythroid (CFU-E), burst forming unit-erythroid (BFU-E), colony-forming unit-granulocyte/macrophage (CFU-GM) and colony-forming unit-granulocyte/erythrocyte/macrophage/megakaryocyte (CFU-GEMM; FIG. 21). The colony forming potential of mock transfected cells was the highest followed by gRNAs targeting +58 erythroid enhancer of BCL11A. A similar number and types of colonies were observed for gRNAs targeting BCL11A erythroid enhancer. The guide RNA targeting exon 2 of BCL11A gave the least number of colonies (FIG. 22).

[0731] Relative mRNA expression levels of BCL11A, gamma- and beta-globin chains in unilineage erythroid cultures were quantified by Real-Time PCR. The transcript levels were normalized against human GAPDH transcript levels. The BCL11A mRNA levels were reduced in genome edited HSPC. In contrast, BCL11A mRNA levels remained the same in unedited or edited HSPC at the exon 2 of BCL11A on days 7 and 14 of erythroid differentiation (FIG. 23). Gamma globin mRNA levels increased and correspondingly beta-globin mRNA decreased gradually in edited HSPC during erythroid differentiation (FIG. 23). Increase in HbF and decrease in beta-globin (sickled globin) levels in erythrocytes derived from genome edited cells likely to have therapeutic implications by reduced sickling.

[0732] The genome edited and unedited HSPC at various stages (day 7, 14 and 21) of erythroid differentiation were analyzed by flow cytometry for expression levels of fetal globin and two erythroid cell surface markers, transferrin receptor (CD71) and glycophorin A (CD235a) using antibodies conjugated to fluorescent dyes. The live cells were identified and gated by exclusion of 7AAD. Genome editing did not adversely affect erythroid differentiation as the cultured cells showed similar levels of CD71 and CD235A positivity consistent with late stage erythroblasts. Genome editing of +58 erythroid enhancer region resulted in a larger increase in HbF containing cells (up to 67%) than other gRNAs and the mock electroporated cells (FIG. 24). Very high induction of HbF positive cells by g7 gRNA targeting exon 2 of BCL11A was observed. However, the cell proliferation and colony forming potential of exon 2 targeted cells was dramatically reduced (FIGS. 21 and 22).

[0733] Upon deep sequencing of the targeted region, we noticed that GATA1 and TAL1 binding motifs were intact in the genome edited target region (FIG. 25). Recent literature demonstrated the importance of GATA1 binding site in regulation of BCL11A expression and derepression of fetal globin. Viestra et al., Nature Methods. 2015, 12:927. In contrast to the literature reports, which showed the importance of the two motifs for maintenance of BCL11A levels in adult erythroid cells, our findings demonstrate that sequences upstream of the two transcription factor binding sites are also important in regulation of BCL11a gene expression, and genome editing exclusively at these upstream sites leads to upregulation of HbF, even when the GATA1 and TAL1 binding sites remain intact.

### Example 3.1

### Methods:

[0734] Human CD34⁺ cell culture. Human CD34+ cells were isolated from G-CSF mobilized peripheral blood from adult donors (AllCells) using immunoselection (Miltenyi) according to the manufacturer's instructions and expanded for 3 days using StemSpan SFEM (StemCell Technologies; Cat no. 09650) supplemented with 50 ng/mL each of thrombopoietin (Tpo), Flt3 ligand (Flt-3L, Life Technologies, Cat. #PHC9413), human stem cell factor (SCF, Life Technologies, Cat. #PHC2113) and human interleukin-6 (IL-6, Life Technologies, Cat. #PHC0063), as well as 1× antibiotic/antimycotic (Gibco, Cat. #10378-016) and 500 nM compound 4.

[0735] Assembly of Cas9 and guide RNA ribonucleoprotein (RNP) complexes, preparation of HSPC, and electroporation of RNP into HSPC. Cas9-guide RNA ribonucleoprotein complexes (RNPs) were prepared immediately prior to electroporation. For formation of RNP using dual guide RNAs (dgRNAs), 3 μg of each of crRNA (in 2.24 μL) and tracr (in 1.25 μL) are first denatured at 95° C. for 2 min in separate tubes and then cooled to room temperature. For preparation of Cas9 protein, 6 μg of CAS9 protein (in 1 μL) was mixed with 0.5 μL of 5×CCE buffer (20 mM HEPES, 100 mM KCL, 5 mM MgCL2, 5% Glycerol and freshly added 1 mM DTT). Tracr was first mixed with the Cas9 preparation and incubated at 37° C. for 5 min. The crRNA was then added to Tracr/CAS9 complexes and incubated for 5 min at 37° C. For the None/control condition, vehicle rather than crRNA was added to the Tracr/CAS9 complexes. The HSPC were collected by centrifugation and resuspended in P3 Primary Cell Solution (Lonza cat. No. PBP3-00675) at a cell density of 2.5×10⁶/mL. The RNP was mixed with 20 μL of cells by pipetting up and down and incubated at RT for 2 min. The RNP/cell mixture (20 μL) was electroporated using code CM-137 on the 4D-Nucleofector (Lonza). Duplicate 20 μL electroporations were performed. For the experiments in this Example 3.1, the tracr used was SEQ ID NO: 7808, and the crRNA had the following format and sequence, with 2′O-Methyl (m) and Phosphorothioate Bond (*) modifications indicated: mN*mN*mN*rNrNrNrNrNrNrNrNrNrNrNrNrNrNrNrNrNrGrUrUrUrUrArGrArGrCrUrArU*mG*m C*mU, where N's are the nucleotides of the indicated targeting domain (e.g., as indicated by the CRxxxxx identifier).

[0736] In vitro erythropoiesis and FACS analysis for HbF containing erythroid cells. After electroporation, the cells were immediately transferred into 250 μL pre-warmed erythroid differentiation medium (EDM) consisting of IMDM (Hyclone, Cat. #SH30228.01), 330 μg/mL human holo-transferrin (Invitria Cat#777TRF029), 10 μg/mL recombinant human insulin (Gibco Cat#A1138211), 2 IU/mL heparin (Sigma, part #H3393), 5% human AB serum (Sigma, Cat# H4522), 125 ng/mL human erythropoietin (Peprotech #10779-058), and 1× antibiotic/antimycotic (Gibco, Cat. #10378-016). EDM was further supplemented with 1 μM hydrocortisone (Sigma H8672), 100 ng/mL human SCF (Life Technologies, Cat. #PHC2113), and 5 ng/mL human IL-3 (Peprotech #10779-598). After 2 days, the cell culture was diluted in fresh medium. Cultures were maintained for a total of 7 days, at which time the cells were analyzed by intracellular staining for HbF expression. Briefly, the cells were washed once with PBS, resuspended in LIVE/DEAD® Fixable Violet Dead Cell Stain (ThermoFisher L34963; 1:1000 in PBS) and incubated for 30 min. Cell were then washed and stained with anti-CD71-BV711 (Fisher Scientific Company Llc. BDB563767) and anti-CD235a-APC (BD 551336) antibodies for 30 min. The cells were then washed, followed by fixation with fixation buffer (Biolegend, Cat#420801) and permeabilized with 1× intracellular staining permeabilization wash buffer (Biolegend, Cat#421002) according to the manufacturer's instructions. The cells were then incubated with 0.5 μL of anti-HbF-PE antibody (Life Technologies, part #MHFH04) in 50 μL of 1× intracellular staining perm wash buffer for 20 min at room temperature. The cells were washed twice with 2 mL of 1× intracellular staining Perm wash buffer and resuspend in staining buffer and analyzed on an LSRFortessa flow cytometer (BD Biosciences) for HbF expression. The results were analyzed using Flowjo and data were presented as % of HbF positive cells (F-cells) in the viable CD71 positive erythroid cell population.

[0737] Genomic DNA preparation and next generation sequencing (NGS). Genomic DNA was prepared from edited and unedited HSPC at 48 hours post-electroporation using Quick Extract DNA Extraction Solution (Epicentre Cat # QE09050). To determine editing efficiency and patterns of insertions and deletions (indels), PCR products were generated using primers flanking the target sites, which were then subjected to next generation sequencing (NGS). Percent editing of corresponding sequences in unedited samples was typically less than 1% and never exceeded 3%.

### Results:

[0738] Without being bound by theory, it is believed that targeted genetic disruption of the BCL11A erythroid enhancer region will relieve repression of γ-globin expression, allowing production of the red blood cells containing elevated HbF protein, (cells expressing fetal hemoglobin, e.g., expressing elevated levels of fetal hemoglobin, are sometimes referred to herein as “F-cells.” In embodiments, a cell is considered an F-cell if it produces as least 6 picograms fetal hemoglobin per cell). The elevated HbF prevents sickling of the red blood cells under deoxygenated conditions and will be therapeutic/curative for the patients of both β-thalassemia and SCD. Autologous hematopoietic stem cell transplantation (HSCT) with ex vivo genome edited HSC from SCD patients was also combined with stem cell expansion enhancing technology, e.g., an aryl hydrocarbon receptor (AHR) inhibitor, e.g., as described in WO2010/059401 (the contents of which are incorporated by reference in their entirety), e.g., Compound 4, to improve ex vivo expansion and increase the dose of gene modified HSC delivered.

[0739] For efficient genome editing via programmable nuclease, Cas9, the successful delivery of guide RNA (gRNA) and Cas9 protein into target cells and tissues is essential. Recent reports demonstrated that Cas9 ribonucleoprotein (RNP) complexes when delivered into target cells by electroporation can accomplish efficient and specific genome editing in several different cell types. Cas9-RNP complexes cleave chromosomal DNA almost immediately after delivery and are degraded rapidly in cells, reducing off-target effects. In contrast, use of plasmid and viral vector systems used to deliver Cas9 results in prolonged expression of the enzyme aggravating off-target effects associated with the system. Additionally, delivery of RNPs into the target cells requires no additional tools which would greatly facilitate translation of genome editing for therapeutic purposes in the clinic. Purified recombinant Cas9 protein and gRNA complexes (RNPs) were delivered into cultured HSPC and an overview experiments used are shown in FIG. 17.

[0740] Recombinant Cas9 protein was purified from Escherichia coli and complexed with synthetic dual gRNAs (dgRNA) that consist of crRNA and tracr to generate ribonucleoprotein (RNP) complexes. The list and of gRNAs used in the study are shown in Table 17 (e.g., gRNAs comprising the targeting domain of the indicated CRxxxxxx identifier). The RNP complexes were electroporated into CD34+ HSPC via electroporation as described under materials and methods. The cells were expanded prior to the delivery of RNP complexes. Actively dividing cells may facilitate uptake of RNP complexes delivered by electroporation.

TABLE 17
List of gRNAs targeting the BCL11A erythroid specific enhancer region
used in the current study. All gRNA molecules were tested in duplicate
in the dgRNA format as described in the materials and methods.

| | % HbF+ (F | % HbF+ (F | | |
|---|---|---|---|---|
| Guide RNA | cells), | cells), | % edited, | % edited, |
| targeting domain | average of | standard | average of | standard |
| ID | replicates | deviation | replicates | deviation |
| CR000308 | 27.7 | 0.5 | 52.8 | 0.7 |
| CR000309 | 43.1 | 1.4 | 74.8 | 7.5 |
| CR000310 | 28.6 | 0.1 | 65.1 | 3.6 |
| CR000311 | 27.2 | 0.7 | 50.5 | 1.9 |
| CR000312 | 47.9 | 1.0 | 87.8 | 0.9 |
| CR000313 | 36.8 | 1.2 | 66.6 | 2.7 |
| CR000314 | 32.7 | 0.1 | 39.8 | 0.5 |
| CR000316_EH11 | 34.4 | 0.8 | 52.9 | 1.3 |
| CR000317_EH4 | 50.7 | 0.4 | 82.7 | 2.5 |
| CR001124 | 28.6 | 0.1 | 2.5 | 0.1 |
| CR001125_EH12 | 42.3 | 0.4 | 94.0 | 0.9 |
| CR001126_EH13 | 44.6 | 1.7 | 76.7 | 6.1 |
| CR001127_EH14 | 33.3 | 0.1 | 26.1 | 3.3 |
| CR001128_EH15 | 46.4 | 1.2 | 84.6 | 5.6 |
| CR001129 | 25.3 | 0.8 | 3.6 | 0.4 |
| CR001130 | 27.1 | 0.8 | 11.8 | 1.7 |
| CR001131 | 28.6 | 0.0 | 35.6 | 8.5 |
| None/control | 22.4 | 0.6 | n/a | n/a |
| g8 | 66.3 | 0.7 | 94.2 | 1.1 |

[0741] The genome edited and unedited HSPC were analyzed by flow cytometry for expression levels of fetal globin and two erythroid cell surface markers, transferrin receptor (CD71) and glycophorin A (CD235a) using antibodies conjugated to fluorescent dyes. The live cells were identified and gated by exclusion of Live Dead Violet. BCL11A erythroid specific enhancer region targeting resulted in increased percentage of erythroid cells containing HbF (up to 50.7%) compared to mock electroporated cells (22.4%) (Table 17). Induction of HbF positive cells by dgRNA including the targeting domain of g8 targeting exon 2 of BCL11A was also observed in parallel. Genomic PCR products of the BCL11A erythroid enhancer region were also subjected to next generation sequencing (NGS) to determine the percentage of edited alleles in the cell population. The dgRNA treatments that resulted in greater than 40% HbF+ cells had a range of 74.8% to 94.0% editing (Table 17). For the same targeting domain, the dgRNA in this Example differed in tracr and crRNA sequence from that in Example 3; however, the editing and HbF induction were similar across dgRNA formats for most targeting domains. Of note, CR000317_EH4 in the dgRNA format in the current study resulted in a high HbF induction to 50.7% HbF+ cells. An increase in HbF-containing erythrocytes derived from genome edited cells is likely to have positive therapeutic implications by reduced sickling.

### Example 3.2. Optimization of gRNA Editing and Fetal Hemoglobin Upregulation Using gRNAs Targeting the +58 Region of the BCL11a Enhancer in HSPCs

[0742] Based on the % editing results from the comprehensive screen of gRNAs targeting the +58 region of the BCL11a Enhancer, 8 gRNA targeting domains were selected for further study and optimization. To test the effect of modifications to the gRNA molecules on % editing, erythroid differentiation, and fetal hemoglobin expression, different versions of the eight gRNA molecules targeting sites within the +58 region of the BCL11a enhancer region were designed. The following versions of of gRNAs comprising the targeting domain of CR00309, CR00311, CR00312, CR00316, CR01125, CR01126, CR01127, and CR01128 were made:

dgRNA (all Sequences Other than Those of the Targeting Domain as Described in Example 1):
[0743] 1. Unmodified crRNA and unmodified tracr (“Unmodified” or “Unmod”)
[0744] 2. Unmodified crRNA and unmodified tracr, but with only the 5′-18nt of the indicated targeting domain (not the full 20 nt) (“18nt”)
[0745] 3. Three 3′ nt and three 5′ nt of crRNA modified with phosphorothioate linkages, and unmodified tracr (“PS”)
[0746] 4. Additional inverted abasic residue at both 5′- and 3′-end of crRNA, and unmodified tracr (“Invd”)
[0747] 5. Three 3′ nt and three 5′ nt of crRNA modified with phosphorothioate linkages and with 2′-Omethyl groups, and unmodified tracr (“OMePS”)
[0748] 6. Three 3′ nt and three 5′ nt of crRNA modified with 2′-fluoro group, and unmodified tmcr (“F”)
[0749] 7. Three 3′ nt and three 5′ nt of crRNA modified with phosphorothioate linkages and with 2′-fluoro group, and unmodified tracr (“F—PS”)
   sgRNA (all Sequences Other than Targeting Domain are as Described in Example 1):
[0750] 1. Unmodified sgRNA (“Unmodified” or “Unmod”)
[0751] 2. Targeting domain consisting of only the 5′-18nt of the indicated targeting domain (not the full 20 nt) (“18nt”)
[0752] 3. Three 3′ nt and three 5′ nt of sgRNA modified with phosphorothioate linkages (“PS”)
[0753] 4. Additional inverted abasic residue at both 5′- and 3′-end of sgRNA (“Invd”)
[0754] 5. Three 3′ nt and three 5′ nt of sgRNA modified with phosphorothioate linkages and with 2′-Omethyl groups (“OMePS”)
[0755] 6. Three 3′ nt and three 5′ nt of sgRNA modified with 2′-fluoro group (“F”)
[0756] 7. Three 3′ nt and three 5′ nt of sgRNA modified with phosphorothioate linkages and with 2′-fluoro group (“F—PS”)

[0757] All other reagents and methods were as described in Example 3. All results were run in duplicate, and the results are reported in FIGS. 28-32. FIG. 28A and FIG. 28B show the % editing, as measured by NGS, in CD34+ cells 2 days after electroporation of RNP comprising the indicated dual guide RNAs (dgRNAs). FIG. 29 shows the % editing, as measured by NGS, in CD34+ cells 2 days after electroporation of RNP comprising the indicated single guide RNAs (sgRNAs). FIG. 30 shows the % HbF positive cells as measured by flow cytometry at day 14 following transfer of edited CD34+ cells to erythroid differentiation medium, after electroporation of RNP comprising the indicated dual guide RNAs (dgRNAs). FIG. 31 shows the % HbF positive cells as measured by flow cytometry at day 14 following transfer of edited CD34+ cells to erythroid differentiation medium, after electroporation of RNP comprising the indicated single guide RNAs (sgRNAs). FIG. 32 shows the fold-expansion of edited cells after 14 days in the erythroid differentiation medium. These results indicate that many of the selected gRNA molecules, in both dgRNA and sgRNA formats, are capable of achieving genome editing at the target site with greater than 90% efficiency, and in some cases, with greater than 98% efficiency, when delivered to CD34+ cells as RNP via electroporation. As well, many of the selected gRNAs were able to achieve a greater than 20% increase in % F cells relative to unmodified cells (“mock”). Finally, although genome editing of BCL11A erythroid enhancer in HSPC lowered the expansion capabilities of erythroid cells, with the effect more pronounced with some gRNAs (e.g., CR00309) than other gRNAs (e.g., CR00312), most edited cell populations differentiated into erythrocytes were non-the-less capable of achieving between 500-1500 population doublings in 14 days in erythroid differentiation medium ex vivo, indicating that the edited cells may be therapeutically useful in treating hemoglobinopathies such as sickle cell disease or beta thalassemia in patients.

### Example 4. HPFH Region Editing in Hematopoietic Stem and Progenitor Cells (HSPCs) Using CRISPR-Cas9 for Derepression of Fetal Globin Expression in Adult Erythroid Cells

### Methods:

[0758] Human CD34⁺ cell culture. Human CD34+ cells were isolated from G-CSF mobilized peripheral blood from adult donors (AllCells) using immunoselection (Miltenyi) according to the manufacturer's instructions and expanded for 4 to 6 days using StemSpan SFEM (StemCell Technologies; Cat no. 09650) supplemented with 50 ng/mL each of thrombopoietin (Tpo), Flt3 ligand (Flt-3L, Life Technologies, Cat. #PHC9413), human stem cell factor (SCF, Life Technologies, Cat. #PHC2113) and human interleukin-6 (IL-6, Life Technologies, Cat. #PHC0063), as well as 1× antibiotic/antimycotic (Gibco, Cat. #10378-016) and 500 nM compound 4. Throughout this example (including its subexamples), where the protocol indicates that cells were “expanded,” this medium was used. This medium is also referred to as “stem cell expansion medium,” or “expansion medium” throughout this example (including its subexamples).

[0759] Assembly of Cas9 and guide RNA ribonucleoprotein (RNP) complexes, preparation of HSPC, and electroporation of RNP into HSPC. Cas9-guide RNA ribonucleoprotein complexes (RNPs) were prepared immediately prior to electroporation. For formation of RNP using dual guide RNAs (dgRNAs), 3 μg of each of crRNA (in 2.24 μL) and tracr (in 1.25 μL) are first denatured at 95° C. for 2 min in separate tubes and then cooled to room temperature. For preparation of Cas9 protein, 6 μg of CAS9 protein (in 0.8 to 1 μL) was mixed with 0.5 μL of 5×CCE buffer (20 mM HEPES, 100 mM KCL, 5 mM MgCL2, 5% Glycerol and freshly added 1 mM DTT). Tracr was first mixed with the Cas9 preparation and incubated at 37° C. for 5 min. The crRNA was then added to Tracr/CAS9 complexes and incubated for 5 min at 37° C. For the None/control condition, vehicle rather than crRNA was added to the Tracr/CAS9 complexes. The HSPC were collected by centrifugation and resuspended in T buffer that comes with Neon electroporation kit (Invitrogen; Cat#: MPK1096) at a cell density of 5×10⁶/mL. The RNP was mixed with 20 μL of cells by pipetting up and down and incubated at RT for 2 min. The RNP/cell mixture (10 μL) was transferred into Neon electroporation probe. The electroporation was performed with Neon transfection system (Invitrogen; MPK5000S) using 1700 volts/20 milliseconds and 1 pulse. Duplicate 10 μL electroporations were performed.

[0760] In vitro erythropoiesis and FACS analysis for HbF containing erythroid cells. After electroporation, the cells were immediately transferred into 250 μL pre-warmed erythroid differentiation medium (EDM) consisting of IMDM (Hyclone, Cat. #SH30228.01), 330 μg/mL human holo-transferrin (Invitria Cat#777TRF029), 10 μg/mL recombinant human insulin (Gibco Cat#A1138211), 2 IU/mL heparin (Sigma, part #H3393), 5% human AB serum (Sigma, Cat# H4522), 125 ng/mL human erythropoietin (Peprotech #10779-058), and 1× antibiotic/antimycotic (Gibco, Cat. #10378-016). EDM was further supplemented with 1 μM hydrocortisone (Sigma H8672), 100 ng/mL human SCF (Life Technologies, Cat. #PHC2113), and 5 ng/mL human IL-3 (Peprotech #10779-598). After 2 days, the cell culture was diluted in fresh medium. Cultures were maintained for a total of 7 days, at which time the cells were analyzed by intracellular staining for HbF expression. Briefly, the cells were washed once with PBS, resuspended in LIVE/DEAD® Fixable Violet Dead Cell Stain (ThermoFisher L34963; 1:1000 in PBS) and incubated for 30 min. Cell were then washed and stained with anti-CD71-BV711 (Fisher Scientific Company Llc. BDB563767) and anti-CD235a-APC (BD 551336) antibodies for 30 min. The cells were then washed, followed by fixation with fixation buffer (Biolegend, Cat#420801) and permeabilized with 1× intracellular staining permeabilization wash buffer (Biolegend, Cat#421002) according to the manufacturers instructions. The cells were then incubated with 0.5 μL of anti-HbF-PE antibody (Life Technologies, part #MHFH04) in 50 μL of 1× intracellular staining perm wash buffer for 20 min at room temperature. The cells were washed twice with 2 mL of 1× intracellular staining Perm wash buffer and resuspend in staining buffer and analyzed on an LSRFortessa flow cytometer (BD Biosciences) for HbF expression. The results were analyzed using Flowjo and data were presented as % of HbF positive cells (F-cells) in the viable CD71 positive erythroid cell population.

[0761] Gene expression analysis. After 7 days of in vitro erythropoiesis as described, approximately 1×10⁵ cells were used to purify RNA using the Zymo Research ZR-96 quick RNA Kit (Zymo Cat# R1053). Up to 1 μg RNA was used for 1st strand synthesis using Quantiscript Reverse Transcription Kit (Qiagen, Cat#205313). Taq-man quantitative real-time PCR was performed using the 2× Taq-Man Fast Advance PR Mix (Life technologies, Cat#4444963) and Taq-Man Gene Expression Assays for GAPDH (Life technologies, ID# Hs02758991_g1, VIC), HBB (Life technologies, ID# Hs00747223_g1, VIC) and HBG2/HBG1 (Life technologies, ID# Hs00361131_g1, FAM), according to the suppliers protocol. The relative expression of each gene was normalized to GAPDH expression and reported as fold of None/control RNP-delivered samples by the ΔΔCt method. Alternatively, after conversion to a GAPDH normalized relative quantity of transcript (2̂-ΔCt), the HBG2/HBG1 expression level was calculated as a percentage of the sum of HBB and HBG2/HBG1 expression.

[0762] Genomic DNA preparation and next generation sequencing (NGS). Genomic DNA was prepared from edited and unedited HSPC at 48 hours post-electroporation using Quick Extract DNA Extraction Solution (Epicentre Cat # QE09050). To determine editing efficiency and patterns of insertions and deletions (indels), PCR products were generated using primers flanking the target sites, which were then subjected to next generation sequencing (NGS) as described in the literature. Percent editing of corresponding sequences in unedited samples (electroporated with RNPs consisting of Cas9 and Tracr only) was typically less than 1% and never exceeded 3%.

### Results:

[0763] Without being bound by theory, it is believed that targeted genetic disruption of the HPFH region will relieve repression of γ-globin expression, allowing production of the red blood cells containing elevated HbF protein, (cells expressing fetal hemoglobin are sometimes referred to herein as “F-cells”). The elevated HbF prevents sickling of the red blood cells under deoxygenated conditions and will be therapeutic/curative for the patients of both β-thalassemia and SCD. Autologous hematopoietic stem cell transplantation (HSCT) with ex vivo genome edited HSC from SCD patients was also combined with stem cell expansion enhancing technology, e.g., an aryl hydrocarbon receptor (AHR) inhibitor, e.g., as described in WO2010/059401 (the contents of which are incorporated by reference in their entirety), e.g., Compound 4 to improve ex vivo expansion and increase the dose of gene modified HSC delivered.

[0764] For efficient genome editing via programmable nuclease, Cas9, the successful delivery of guide RNA (gRNA) and Cas9 protein into target cells and tissues is essential. Recent reports demonstrated that Cas9 ribonucleoprotein (RNP) complexes when delivered into target cells by electroporation can accomplish efficient and specific genome editing in several different cell types. Cas9-RNP complexes cleave chromosomal DNA almost immediately after delivery and are degraded rapidly in cells, reducing off-target effects. In contrast, use of plasmid and viral vector systems used to deliver Cas9 results in prolonged expression of the enzyme aggravating off-target effects associated with the system. Additionally, delivery of RNPs into the target cells requires no additional tools which would greatly facilitate translation of genome editing for therapeutic purposes in the clinic. Purified recombinant Cas9 protein and gRNA complexes (RNPs) were delivered into cultured HSPC and an overview experiments used are shown in FIG. 17.

[0765] Recombinant Cas9 protein was purified from Escherichia coli and complexed with synthetic dual gRNAs (dgRNA) that consist of crRNA and tracr to generate ribonucleoprotein (RNP) complexes. The list and sequences of gRNAs used in the study are shown in Table 16. The RNP complexes were electroporated into CD34+ HSPC via electroporation as described under materials and methods. The cells were expanded prior to the delivery of RNP complexes. Actively dividing cells may facilitate uptake of RNP complexes delivered by electroporation.

TABLE 16
List of gRNAs targeting the HPFH region used in the current study. All gRNA
molecules were tested in duplicate in the dgRNA format described above,
except for g8 (crRNA consisting of mN*mN*mN*rNrNrNrNrNrNrNrNrNrNr-
NrNrNrNrNrNrNrGrUrUrUrUrArGrArGrCrUrArU*mG*m C*mU, where N's are
the residues of the targeting domain, and modifications are indicated
as follows: 2′O-Methyl (m) and Phosphorothioate Bond (*); with the
tracr sequence SEQ ID NO: 7808) and None/control. The g8 and None/
control were tested in 16 replicates each.

| | % HbF+ (F | % HbF+ (F | | | | |
|---|---|---|---|---|---|---|
| Guide RNA | cells), | cells), | % CD71+, | % CD71+, | % edited, | % edited, |
| targeting | average of | standard | average of | standard | average of | standard |
| domain ID | replicates | deviation | replicates | deviation | replicates | deviation |
| CR001030 | 51.4 | 5.2 | 84.4 | 0.6 | 84.5 | 1.6 |
| CR001095 | 49.3 | 1.8 | 82.7 | 2.5 | 66.1 | 1.4 |
| CR001043 | 44.8 | 2.0 | 84.1 | 0.8 | 80.0 | 0.7 |
| CR001029 | 43.7 | 1.3 | 82.2 | 0.7 | 86.6 | 2.7 |
| CR001142 | 43.4 | 0.6 | 83.9 | 0.1 | 76.9 | 0.4 |
| CR001028 | 42.9 | 1.3 | 84.8 | 0.5 | 91.7 | 0.5 |
| CR001212 | 42.6 | 5.8 | 83.1 | 0.9 | 81.6 | 1.5 |
| CR001036 | 42.4 | 1.3 | 82.6 | 0.6 | 91.5 | 5.0 |
| CR001135 | 42.4 | 0.7 | 83.7 | 0.1 | 84.4 | 13.3 |
| CR001221 | 41.8 | 1.7 | 80.8 | 0.4 | 83.9 | 1.4 |
| CR001158 | 41.7 | 1.3 | 81.7 | 0.2 | 72.4 | 2.7 |
| CR001090 | 41.3 | 0.1 | 85.5 | 0.8 | 87.2 | 1.2 |
| CR001169 | 41.3 | 1.5 | 82.4 | 2.6 | 80.2 | 2.5 |
| CR001089 | 40.9 | 0.6 | 82.8 | 6.6 | 81.7 | 0.3 |
| CR001031 | 40.8 | 0.1 | 81.5 | 1.8 | 90.7 | 1.8 |
| CR001092 | 40.8 | 2.2 | 84.1 | 0.1 | 43.0 | 1.1 |
| CR001034 | 40.7 | 1.0 | 84.5 | 0.0 | 72.7 | 3.8 |
| CR001068 | 40.7 | 2.3 | 85.7 | 0.4 | 90.5 | 0.9 |
| CR001168 | 40.2 | 3.4 | 82.6 | 0.1 | 74.2 | 7.1 |
| CR001171 | 40.1 | 1.6 | 83.4 | 0.4 | 63.8 | 1.6 |
| CR001217 | 40.1 | 0.8 | 81.9 | 0.1 | 80.9 | 0.8 |
| CR001023 | 39.6 | 3.2 | 82.2 | 0.8 | 90.2 | 0.7 |
| CR001093 | 39.3 | 0.3 | 86 | 1.1 | 38.3 | 14.5 |
| CR001080 | 39.2 | 3.4 | 87.1 | 1.1 | 32.4 | 1.1 |
| CR001164 | 38.6 | 2.0 | 84.4 | 0.4 | 92.0 | 0.7 |
| CR001178 | 38.6 | 1.2 | 82.6 | 2.4 | 61.1 | 0.6 |
| CR001032 | 38.4 | 9.2 | 82.4 | 0.6 | 57.6 | 32.9 |
| CR001100 | 38.4 | 1.8 | 81.7 | 0.2 | 29.6 | 2.4 |
| CR001156 | 38.4 | 1.2 | 81.6 | 0.3 | 91.2 | 3.6 |
| CR001159 | 38.4 | 1.8 | 81.8 | 0.2 | 65.5 | 0.7 |
| CR001042 | 38.2 | 0.4 | 83.1 | 1.0 | 90.8 | 0.3 |
| CR001065 | 38.2 | 0.0 | 85.2 | 2.0 | 86.5 | 0.2 |
| CR001133 | 38.1 | 0.0 | 83.6 | 0.5 | 92.1 | 0.8 |
| CR001173 | 38 | 1.5 | 81.7 | 1.1 | 72.5 | 5.0 |
| CR001161 | 37.7 | 4.6 | 82.3 | 1.7 | 54.8 | 10.7 |
| CR001138 | 37.6 | 7.6 | 83.7 | 0.7 | 69.4 | 28.9 |
| CR001037 | 37.4 | 1.3 | 81.2 | 0.8 | 90.5 | 1.5 |
| CR001098 | 37.4 | 1.2 | 85.6 | 1.5 | 95.0 | 0.2 |
| CR001150 | 37.3 | 2.0 | 84.8 | 0.4 | 52.8 | 7.5 |
| CR001160 | 37.3 | 0.5 | 81.4 | 1.5 | 65.9 | 1.6 |
| CR001197 | 37.3 | 1.1 | 83.3 | 1.6 | 83.8 | 2.8 |
| CR001170 | 37.2 | 1.3 | 83.7 | 1.2 | 47.3 | 0.3 |
| CR001226 | 37 | 1.0 | 82.5 | 1.3 | 65.3 | 2.0 |
| CR001018 | 36.9 | 0.8 | 80.9 | 0.8 | 97.2 | 0.0 |
| CR001109 | 36.8 | 0.3 | 84.7 | 1.4 | 91.0 | 2.4 |
| CR001219 | 36.8 | 0.6 | 82.5 | 0.1 | 75.9 | 0.2 |
| CR001047 | 36.7 | 0.6 | 83.2 | 0.3 | 70.8 | 1.5 |
| CR001101 | 36.6 | 3.3 | 81.7 | 0.1 | 50.6 | 3.8 |
| CR001046 | 36.5 | 1.0 | 84 | 0.3 | 76.9 | 4.2 |
| CR001021 | 36.4 | 0.3 | 82.2 | 0.4 | 79.5 | 2.9 |
| CR001060 | 36.3 | 3.2 | 84.1 | 1.1 | 50.0 | 0.4 |
| CR001074 | 36.3 | 1.6 | 87.3 | 1.8 | 56.5 | 4.9 |
| CR001097 | 36.3 | 0.2 | 87.1 | 1.3 | 58.5 | 2.1 |
| CR001099 | 36.1 | 4.0 | 85.8 | 1.8 | 89.8 | 0.3 |
| CR001172 | 36.1 | 1.7 | 82.2 | 0.7 | 71.1 | 3.7 |
| CR001195 | 36.1 | 0.8 | 83.4 | 0.2 | 67.2 | 2.7 |
| CR001075 | 36 | 1.9 | 87.2 | 0.1 | 56.8 | 2.6 |
| CR001143 | 35.9 | 3.7 | 83.5 | 0.4 | 56.7 | 9.2 |
| CR001063 | 35.8 | 1.3 | 84.3 | 0.4 | 71.7 | 1.9 |
| CR001225 | 35.5 | 0.4 | 83.1 | 0.5 | 81.1 | 4.2 |
| CR001027 | 35.4 | 0.9 | 81.9 | 0.8 | 71.1 | 0.5 |
| CR001073 | 35.4 | 1.6 | 86.5 | 1.6 | 56.3 | 5.9 |
| CR001180 | 35.3 | 1.1 | 79.6 | 1.4 | 86.2 | 4.0 |
| CR001182 | 35.3 | 0.8 | 81.8 | 0.2 | 72.5 | 3.9 |
| CR001162 | 35.2 | 9.1 | 85 | 0.0 | 62.6 | 35.7 |
| CR001026 | 35.1 | 1.0 | 82.4 | 0.2 | 97.0 | 0.3 |
| CR001078 | 35 | 1.1 | 85 | 1.7 | 12.7 | 1.8 |
| CR001025 | 34.9 | 0.3 | 81.9 | 1.5 | 55.5 | 3.8 |
| CR001187 | 34.9 | 2.5 | 79.4 | 2.3 | 70.1 | 3.7 |
| CR001081 | 34.8 | 1.4 | 87.5 | 4.0 | 27.0 | 0.7 |
| CR001137 | 34.8 | 13.6 | 83.8 | 1.6 | 41.5 | 39.8 |
| CR001174 | 34.8 | 0.5 | 81.8 | 0.6 | 34.1 | 3.2 |
| CR001058 | 34.6 | 1.0 | 83.3 | 1.5 | 71.4 | 6.2 |
| CR001188 | 34.6 | 1.3 | 82.6 | 1.2 | 64.0 | 2.2 |
| CR001079 | 34.4 | 2.5 | 89.2 | 0.2 | 12.8 | 2.0 |
| CR001179 | 34.4 | 3.2 | 82 | 0.4 | 81.4 | 4.3 |
| CR001214 | 34 | 2.2 | 82.1 | 1.5 | 58.1 | 1.0 |
| CR001139 | 33.9 | 1.9 | 83 | 2.5 | 70.3 | 0.4 |
| CR001222 | 33.9 | 1.6 | 80.6 | 0.8 | 35.5 | 1.4 |
| CR001096 | 33.8 | 0.1 | 85.6 | 2.2 | 77.5 | 1.0 |
| CR001148 | 33.6 | 2.1 | 84.5 | 0.4 | 50.9 | 4.0 |
| CR001140 | 33.5 | 0.4 | 84 | 1.4 | 66.3 | 1.5 |
| CR001191 | 33.5 | 2.5 | 83.2 | 0.3 | 83.4 | 5.1 |
| CR001227 | 33.5 | 2.3 | 79 | 0.2 | 56.3 | 0.1 |
| CR001110 | 33.4 | 0.4 | 85.2 | 0.1 | 70.3 | 0.1 |
| CR001220 | 33.4 | 1.7 | 81.4 | 0.4 | 72.4 | 3.3 |
| CR001224 | 33.4 | 3.1 | 82.2 | 1.3 | 71.3 | 2.3 |
| CR001033 | 33.2 | 0.3 | 81.9 | 0.6 | 63.6 | 8.1 |
| CR001051 | 33.2 | 0.6 | 82.2 | 0.6 | 42.2 | 0.5 |
| CR001106 | 33.2 | 0.2 | 82.6 | 3.0 | 46.9 | 2.0 |
| CR001020 | 32.9 | 8.9 | 81.9 | 1.3 | 67.7 | 29.4 |
| CR001022 | 32.9 | 0.8 | 82.4 | 1.6 | 91.5 | 0.3 |
| CR001045 | 32.9 | 0.4 | 80.5 | 0.0 | 88.5 | 0.4 |
| CR001198 | 32.9 | 0.5 | 81.3 | 1.8 | 96.8 | 0.5 |
| CR001084 | 32.8 | 1.7 | 87.5 | 0.1 | 55.1 | 5.4 |
| CR001111 | 32.6 | 1.0 | 84.2 | 2.5 | 78.1 | 1.4 |
| CR001087 | 32.5 | 0.1 | 87.6 | 0.7 | 89.6 | 2.6 |
| CR001107 | 32.5 | 0.4 | 83.3 | 1.8 | 46.5 | 2.2 |
| CR001108 | 31.8 | 1.8 | 84.7 | 0.6 | 75.2 | 3.3 |
| CR001205 | 31.7 | 2.3 | 81.3 | 6.2 | 2.7 | 1.7 |
| CR001085 | 31.6 | 2.1 | 86 | 0.3 | 31.2 | 1.2 |
| CR001166 | 31.5 | 0.5 | 83.6 | 0.8 | 86.9 | 0.3 |
| CR001019 | 31.3 | 2.3 | 80.6 | 0.9 | 35.1 | 4.0 |
| CR001076 | 31.3 | 0.5 | 86.6 | 0.2 | 96.3 | 0.3 |
| CR001016 | 31.2 | 1.2 | 80.2 | 0.7 | 95.0 | 1.9 |
| CR001035 | 31.1 | 1.8 | 83.5 | 1.3 | 80.0 | 0.9 |
| CR001192 | 31 | 2.5 | 79.9 | 0.7 | 60.4 | 5.1 |
| CR001091 | 30.7 | 2.8 | 85.3 | 0.6 | 72.4 | 7.6 |
| CR001105 | 30.7 | 0.1 | 84.8 | 0.1 | 12.1 | 1.1 |
| CR001185 | 30.7 | 0.7 | 82.7 | 0.4 | 36.7 | 0.2 |
| CR001190 | 30.7 | 0.1 | 82.4 | 0.7 | 53.2 | 0.8 |
| CR001024 | 30.6 | 0.4 | 81.8 | 0.7 | 97.0 | 0.6 |
| CR001132 | 30.5 | 2.3 | 84.6 | 0.1 | 26.4 | 2.2 |
| CR001189 | 30.4 | 1.9 | 83.1 | 0.3 | 42.0 | 0.6 |
| CR001040 | 30.1 | 8.3 | 77.5 | 2.2 | 73.6 | 33.6 |
| CR001146 | 30.1 | 1.5 | 83.8 | 0.1 | 88.1 | 2.1 |
| CR001070 | 29.8 | 0.9 | 82.7 | 0.4 | 44.9 | 0.8 |
| CR001213 | 29.8 | 1.8 | 81.9 | 0.2 | 48.4 | 4.4 |
| CR001017 | 29.6 | 11.8 | 81.3 | 1.5 | 44.3 | 36.8 |
| CR001077 | 29.5 | 0.9 | 87.2 | 2.5 | 14.3 | 0.5 |
| CR001083 | 29.4 | 1.1 | 84.3 | 9.1 | 26.6 | 10.6 |
| CR001082 | 29 | 0.7 | 87.6 | 1.5 | 17.7 | 0.0 |
| CR001175 | 29 | 1.1 | 81.7 | 0.1 | 6.3 | 0.7 |
| CR001144 | 28.9 | 0.4 | 82.6 | 0.9 | 38.8 | 1.1 |
| CR001194 | 28.8 | 4.3 | 81.8 | 0.6 | 70.2 | 1.9 |
| CR001157 | 28.5 | 1.1 | 81 | 1.3 | 29.2 | 4.2 |
| CR001163 | 28.4 | 0.6 | 83.5 | 0.7 | 13.4 | 3.0 |
| CR001151 | 28.2 | 0.6 | 84.6 | 1.6 | 51.8 | 2.3 |
| CR001181 | 28.2 | 0.2 | 80.3 | 0.8 | 46.0 | 0.5 |
| CR001061 | 28 | 2.9 | 82.6 | 0.4 | 53.6 | 5.8 |
| CR001152 | 27.8 | 0.8 | 84.9 | 0.2 | 37.0 | 1.9 |
| CR001094 | 27.7 | 9.2 | 74.6 | 12.7 | 85.2 | 2.1 |
| CR001202 | 27.7 | 6.3 | 84 | 2.3 | 61.7 | 8.4 |
| CR001149 | 27.6 | 1.7 | 84.1 | 0.6 | 10.8 | 1.3 |
| CR001207 | 27.6 | 5.7 | 83.3 | 0.1 | 31.5 | 17.5 |
| CR001134 | 27.2 | 1.6 | 83.2 | 1.3 | 2.3 | 0.2 |
| CR001206 | 27.2 | 1.8 | 84.4 | 0.2 | 11.1 | 0.4 |
| CR001067 | 27 | 18.4 | 84.2 | 2.6 | 6.0 | 0.8 |
| CR001167 | 27 | 0.5 | 81.7 | 0.2 | 32.3 | 0.1 |
| CR001209 | 27 | 0.8 | 81.5 | 2.5 | 14.8 | 0.2 |
| CR001165 | 26.9 | 0.5 | 81.6 | 1.3 | 12.9 | 2.1 |
| CR001044 | 26.8 | 7.2 | 78.2 | 4.3 | 28.5 | 20.7 |
| CR001052 | 26.6 | 0.3 | 82.5 | 1.5 | 26.5 | 0.9 |
| CR001062 | 26.6 | 0.7 | 78.7 | 2.8 | 39.1 | 5.3 |
| CR001071 | 26.6 | 1.0 | 84.2 | 0.4 | 15.1 | 1.1 |
| CR001210 | 26.6 | 2.1 | 80.1 | 3.3 | 58.6 | 2.2 |
| CR001223 | 26.6 | 0.9 | 80.2 | 0.8 | 40.3 | 1.9 |
| CR001057 | 26.5 | 6.5 | 82.4 | 0.1 | 25.0 | 18.9 |
| CR001147 | 26.5 | 1.3 | 83.5 | 0.4 | 33.1 | 2.7 |
| CR001186 | 26.4 | 2.1 | 79.6 | 3.8 | 40.5 | 2.1 |
| CR001103 | 26.1 | 0.2 | 84.3 | 0.0 | 51.2 | 3.6 |
| CR001199 | 25.9 | 0.8 | 80.9 | 1.5 | 89.3 | 1.4 |
| CR001216 | 25.7 | 1.0 | 77.7 | 0.0 | 43.2 | 2.7 |
| CR001041 | 25.6 | 1.8 | 78.9 | 4.8 | 22.4 | 2.1 |
| CR001053 | 25.5 | 1.4 | 82.4 | 1.9 | 38.4 | 0.3 |
| CR001086 | 25.4 | 0.6 | 84.4 | 0.9 | 30.4 | 0.6 |
| CR001050 | 25.1 | 0.4 | 80.6 | 1.1 | 4.9 | 0.2 |
| CR001136 | 25.1 | 0.7 | 82.3 | 1.0 | 9.1 | 1.1 |
| CR001203 | 25.1 | 4.0 | 83.4 | 1.8 | 22.0 | 13.1 |
| CR001211 | 24.8 | 1.1 | 83.3 | 0.4 | 5.0 | 1.0 |
| CR001066 | 24.4 | 0.4 | 86.1 | 0.1 | 15.2 | 1.8 |
| CR001145 | 24.4 | 1.0 | 83.5 | 0.9 | 16.4 | 8.9 |
| CR001049 | 24.3 | 0.3 | 83.9 | 1.9 | 3.7 | 0.0 |
| CR001176 | 24.3 | 0.6 | 81.9 | 0.6 | 29.0 | 1.4 |
| CR001218 | 24.1 | 0.2 | 81.9 | 0.1 | 21.6 | 2.4 |
| CR001141 | 23.8 | 0.5 | 82.8 | 0.4 | 4.1 | 0.8 |
| CR001196 | 23.6 | 0.8 | 82.5 | 0.6 | 18.2 | 2.9 |
| CR001184 | 23.5 | 0.4 | 81.1 | 0.4 | 43.5 | 1.6 |
| CR001204 | 23.3 | 1.1 | 81.5 | 0.7 | 0.5 | 0.2 |
| CR001069 | 23.1 | 1.1 | 85 | 0.0 | 16.2 | 0.3 |
| CR001072 | 23 | 0.3 | 84.2 | 0.7 | 15.6 | 0.3 |
| CR001102 | 22.8 | 1.7 | 84.7 | 1.6 | 58.1 | 4.8 |
| CR001153 | 22.8 | 1.3 | 82.8 | 0.1 | 17.2 | 2.6 |
| CR001177 | 22.8 | 0.5 | 82.2 | 0.9 | 2.0 | 0.2 |
| CR001104 | 22.7 | 1.7 | 84.8 | 1.1 | 29.4 | 5.0 |
| CR001064 | 22.6 | 1.1 | 82.1 | 1.0 | 35.8 | 5.2 |
| CR001200 | 22.6 | 0.1 | 82 | 0.0 | 9.8 | 0.7 |
| CR001154 | 22.4 | 0.0 | 82.2 | 1.3 | 8.0 | 1.1 |
| CR001055 | 22.3 | 1.0 | 83.4 | 1.1 | 19.0 | 0.8 |
| CR001054 | 22 | 1.1 | 83.5 | 1.0 | 11.3 | 1.4 |
| CR001039 | 21.9 | 0.2 | 80.8 | 0.2 | 16.6 | 1.5 |
| CR001183 | 21.6 | 0.7 | 81.4 | 0.8 | 13.3 | 0.1 |
| CR001155 | 21.4 | 0.0 | 81.6 | 0.8 | 5.0 | 1.0 |
| CR001059 | 21.1 | 0.6 | 82.5 | 1.2 | 4.6 | 0.3 |
| CR001056 | 20.8 | 0.9 | 83.2 | 0.2 | 3.7 | 0.9 |
| CR001193 | 20.5 | 0.9 | 80.4 | 0.9 | 4.8 | 0.2 |
| CR001208 | 20.5 | 0.1 | 81.1 | 0.9 | 12.6 | 3.0 |
| CR001201 | 20.1 | 1.7 | 81.7 | 0.6 | 10.7 | 0.7 |
| CR001048 | 19.3 | 3.0 | 82.3 | 1.1 | 0.4 | 0.3 |
| CR001215 | 19.2 | 0.2 | 81.2 | 2.3 | 5.6 | 2.2 |
| CR001038 | 19.1 | 0.1 | 80.8 | 1.3 | 6.5 | 1.1 |
| CR001088 | 18.8 | 5.9 | 67.3 | 2.7 | 74.6 | 2.3 |
| None/control | 21.0 | 2.0 | 82.9 | 1.9 | n/a | n/a |
| g8 | 59.2 | 3.0 | 74.3 | 4.4 | 95.1 | 1.8 |

[0766] The genome edited and unedited HSPC were analyzed by flow cytometry for expression levels of fetal globin and two erythroid cell surface markers, transferrin receptor (CD71) and glycophorin A (CD235a) using antibodies conjugated to fluorescent dyes. The live cells were identified and gated by exclusion of Live Dead Violet. Genome editing did not adversely affect erythroid differentiation as the cultured cells showed percentages of CD71+ cells consistent with erythroblasts similar to uneditied cells. HPFH region targeting resulted in increased percentage of erythroid cells containing HbF (up to 51.4%) compared to mock electroporated cells (21.0%) (Table 16). Induction of HbF positive cells by dgRNA including the targeting domain of g8 targeting exon 2 of BCL11A was also observed in parallel. Genomic PCR products of the HPFH region were also subjected to next generation sequencing (NGS) to determine the percentage of edited alleles in the cell population. High genome editing percentages at the HFPH locus was observed in many of the cell cultures electroporated with RNPs containing Cas9, crRNA of the given targeting domain and Tracr (Table 16), but not in control cells with no targeting domain delivered (RNPs containing only Cas9 and Tracr). In particular, the dgRNA treatments that resulted in greater than 40% HbF+ cells had a range of 43.0% to 91.7% edited alleles (Table 16).

TABLE 18
Gene expression analysis of select cultures edited with gRNAs targeting
the HPFH region in the current study. All gRNA molecules were tested in
duplicate in the dgRNA format. Fetal gamma-globin (γ-globin, HBG2/
HBG1 genes), adult beta-globin (β-globin, HBB gene) and
Glyceraldehyde- 3-Phosphate Dehydrogenase (GAPDH gene)
expression were determined and reported as described
in Materials and Methods.

| | | γ-globin | β-globin | |
|---|---|---|---|---|
| | | expression, | expression, | % globin |
| | | fold over | fold over | expression, |
| Guide RNA | Number of | control | control | γ/(γ + β) |
| targeting | electroporation | (average of | (average of | (average of |
| domain ID | replicates | replicates) | replicates) | replicates) |
| CR001030 | 2 | 3.8 | 0.91 | 26.6 |
| CR001142 | 2 | 1.6 | 0.76 | 20.0 |
| CR001212 | 2 | 2.2 | 0.58 | 18.6 |
| CR001036 | 2 | 2.6 | 0.91 | 19.7 |
| CR001221 | 2 | 2.3 | 0.79 | 15.2 |
| CR001217 | 2 | 1.9 | 0.72 | 13.8 |
| None/control | 5 | 1 | 1 | 7.7 |

[0767] Some cultures in this study were also analyzed for hemoglobin gene expression. Of these targeting domains, fetal gamma-globin gene expression was induced 1.6 to 3.8-fold over None/control, which was accompanied by a modest reduction in adult beta-globin expression (0.58 to 0.91-fold of None/control) (Table 18). These effects together resulted in gamma-globin expression levels ranging from 13.8% to 26.6% of the total beta-type globins (γ/[γ+β]) in the cell population (Table 17), with relative fetal globin induction across targeting domains similar to that observed for HbF protein induction (Table 16). Either an increase in HbF/gamma-globin or an increase in HbF/gamma-globin together with a decrease in beta-globin (sickled globin) levels in erythrocytes derived from genome edited cells is likely to have therapeutic implications by reduced sickling.

### Example 4.2

[0768] Methods: Methods are as in Example 4, with the Following Exceptions.

[0769] Assembly of Cas9 and guide RNA ribonucleoprotein (RNP) complexes, preparation of HSPC, and electroporation of RNP into HSPC. The HSPC collected by centrifugation were resuspended in P3 Primary Cell Solution (Lonza cat. No. PBP3-00675) at a cell density of 2.5×10⁶/mL. The RNP was mixed with 20 μL of cells by pipetting up and down and incubated at RT for 2 min. The RNP/cell mixture (20 μL) was electroporated using code CM-137 on the 4D-Nucleofector (Lonza).

### Results:

[0770] Without being bound by theory, it is believed that targeted genetic disruption of the HPFH region will relieve repression of γ-globin expression, allowing production of the red blood cells containing elevated HbF protein, (cells expressing fetal hemoglobin are sometimes referred to herein as “F-cells”). The elevated HbF prevents sickling of the red blood cells under deoxygenated conditions and will be therapeutic/curative for the patients of both β-thalassemia and SCD. Autologous hematopoietic stem cell transplantation (HSCT) with ex vivo genome edited HSC from SCD patients was also combined with stem cell expansion enhancing technology, e.g., an aryl hydrocarbon receptor (AHR) inhibitor, e.g., as described in WO2010/059401 (the contents of which are incorporated by reference in their entirety), e.g., Compound 4 to improve ex vivo expansion and increase the dose of gene modified HSC delivered.

[0771] For efficient genome editing via programmable nuclease, Cas9, the successful delivery of guide RNA (gRNA) and Cas9 protein into target cells and tissues is essential. Recent reports demonstrated that Cas9 ribonucleoprotein (RNP) complexes when delivered into target cells by electroporation can accomplish efficient and specific genome editing in several different cell types. Cas9-RNP complexes cleave chromosomal DNA almost immediately after delivery and are degraded rapidly in cells, reducing off-target effects. In contrast, use of plasmid and viral vector systems used to deliver Cas9 results in prolonged expression of the enzyme aggravating off-target effects associated with the system. Additionally, delivery of RNPs into the target cells requires no additional tools which would greatly facilitate translation of genome editing for therapeutic purposes in the clinic. Purified recombinant Cas9 protein and gRNA complexes (RNPs) were delivered into cultured HSPC and an overview experiments used are shown in FIG. 17.

[0772] Recombinant Cas9 protein was purified from Escherichia coli and complexed with synthetic dual gRNAs (dgRNA) that consist of crRNA and tracr to generate ribonucleoprotein (RNP) complexes. The list of gRNAs used in the study are shown in Table 19. The RNP complexes were electroporated into CD34+ HSPC via electroporation as described under materials and methods. The cells were expanded prior to the delivery of RNP complexes. Actively dividing cells may facilitate uptake of RNP complexes delivered by electroporation.

TABLE 19
List of gRNAs targeting the HPFH region used in the current study. All
gRNA molecules were tested in the dgRNA format (except for g8 which
was tested in the dgRNA format using: crRNA consisting of
mN*mN*mN*rNrNrNrNrNrNrNrNrNrNrNrNrNrNrNrNrNrGrUrUrUr
UrArGrArGrCrUrArU*mG*mC*mU, where N's are the residues
of the targeting domain, and modifications are indicated as
follows: 2′O-Methyl (m) and Phosphorothioate Bond (*); with the
tracr sequence SEQ ID NO: 7808).

| Guide RNA | | |
|---|---|---|
| targeting | % HbF+ (F | |
| domain ID | cells) | % CD71+ |
| CR003037 | 46.6 | 80.3 |
| CR003033 | 45.4 | 75.9 |
| CR003038 | 42.9 | 77.6 |
| CR003035 | 42.1 | 77.8 |
| CR003087 | 42.1 | 76.7 |
| CR003085 | 41.8 | 77.6 |
| CR003052 | 39.9 | 80.5 |
| CR003080 | 38.0 | 80.1 |
| CR003081 | 35.3 | 80.6 |
| CR003031 | 34.8 | 77.7 |
| CR003056 | 34.3 | 78.3 |
| CR003070 | 33.9 | 81.2 |
| CR003089 | 33.8 | 77.8 |
| CR003065 | 33.0 | 76.4 |
| CR003075 | 33.0 | 75.2 |
| CR003088 | 33.0 | 77.3 |
| CR003041 | 32.1 | 76.2 |
| CR003039 | 31.9 | 75.7 |
| CR003044 | 30.6 | 77.7 |
| CR003084 | 29.7 | 77.2 |
| CR003073 | 29.5 | 76.9 |
| CR003066 | 29.3 | 77.9 |
| CR003082 | 29.3 | 78.6 |
| CR003067 | 29.2 | 78.1 |
| CR003074 | 29.1 | 77.5 |
| CR003095 | 28.8 | 80.4 |
| CR003083 | 28.3 | 76.6 |
| CR003030 | 27.9 | 78.4 |
| CR003069 | 27.7 | 78.9 |
| CR003055 | 27.6 | 78.9 |
| CR003058 | 27.6 | 78.8 |
| CR003054 | 27.5 | 79.0 |
| CR003029 | 27.1 | 78.4 |
| CR003086 | 27.1 | 76.6 |
| CR003063 | 27.0 | 76.0 |
| CR003071 | 26.5 | 79.5 |
| CR003079 | 26.5 | 78.0 |
| CR003042 | 26.4 | 77.0 |
| CR003045 | 26.3 | 78.0 |
| CR003034 | 25.9 | 76.8 |
| CR003027 | 25.7 | 79.2 |
| CR003043 | 25.0 | 76.0 |
| CR003032 | 24.9 | 77.9 |
| CR003040 | 24.9 | 75.7 |
| CR003028 | 24.8 | 78.6 |
| CR003048 | 24.8 | 80.4 |
| CR003057 | 24.7 | 79.0 |
| CR003096 | 24.6 | 78.9 |
| CR003077 | 24.4 | 77.7 |
| CR003036 | 24.3 | 76.8 |
| CR003049 | 24.3 | 78.4 |
| CR003047 | 24.0 | 78.2 |
| CR003059 | 23.9 | 80.2 |
| CR003051 | 23.7 | 77.2 |
| CR003053 | 23.7 | 76.9 |
| CR003091 | 23.7 | 80.2 |
| CR003093 | 23.7 | 79.2 |
| CR003060 | 23.6 | 78.9 |
| CR003072 | 23.6 | 77.7 |
| CR003076 | 23.6 | 78.0 |
| CR003078 | 23.6 | 78.0 |
| CR003064 | 23.4 | 75.9 |
| CR003046 | 23.3 | 80.5 |
| CR003092 | 22.9 | 81.7 |
| CR003090 | 22.7 | 79.7 |
| CR003050 | 22.6 | 77.2 |
| CR003062 | 22.1 | 76.5 |
| CR003061 | 21.5 | 76.3 |
| CR003068 | 21.5 | 78.8 |
| CR003094 | 21.0 | 79.6 |
| None/control | 18.9 | 77.0 |
| replicate 1 | | |
| None/control | 21.1 | 79.7 |
| replicate 2 | | |
| g8 replicate 1 | 56.8 | 65.4 |
| g8 replicate 2 | 56.4 | 65.8 |

[0773] The genome edited and unedited HSPC were analyzed by flow cytometry for expression levels of fetal globin and two erythroid cell surface markers, transferrin receptor (CD71) and glycophorin A (CD235a) using antibodies conjugated to fluorescent dyes. The live cells were identified and gated by exclusion of Live Dead Violet. Genome editing did not adversely affect erythroid differentiation as the cultured cells showed percentages of CD71+ cells consistent with erythroblasts similar to uneditied cells. HPFH region targeting resulted in increased percentage of erythroid cells containing HbF (up to 46.6%) compared to mock electroporated cells (18.9 and 21.1%) (Table 19). Induction of HbF positive cells by dgRNA including the targeting domain of g8 targeting exon 2 of BCL11A was also observed in parallel.

[0774] Finally, the indel pattern created at or near the target site for dgRNAs comprising the targeting domains of CR003031, CR003033, CR003035, CR003037, CR003038, CR003052, CR003085 were assessed by NGS. The top 5 most frequent indels at each location are shown in Table 27.

TABLE 27
5 most frequent indels at each taget sequence after exposure to RNP
comprising the indicated gRNA molecule. Each gRNA was tested in dgRNA.
Capital letters are the naturally occurring nucleotides at and near the target
sequence. Deletions relative to the unmodified target sequence are shown
as “—”; insertions are shown as lowercase letters.

| dgRNA | | | |
|---|---|---|---|
| targeting | | % of all | Indel |
| domain | Variant Read (Genomic Sequence) | reads | Length |
| CR003031 | ACTGTTGATTAGAGGTAGGGAAATGATTTTAATCTGTGACCTTGG------- | 9.74% | −7 |
| | GCAAGTAGCTATCTAATGACTAAAATGG | | |
| CR003031 | ACTGTTGATTAGAGGTAGGGAAATGATTTTAATCTGTGACCTTGGTtGAATGGGC | 7.82% | 1 |
| | AAGTAGCTATCTAATGACTAAAATGG | | |
| CR003031 | ACTGTTGATTAGAGGTAGGGAAATGATTTTAATCTGTGACCTTG--- | 2.19% | −3 |
| | AATGGGCAAGTAGCTATCTAATGACTAAAATGG | | |
| CR003031 | ACTGTTGATTAGAGGTAGGGAAATGATTTTAATCTGTGACCTTG- | 1.37% | −1 |
| | TGAATGGGCAAGTAGCTATCTAATGACTAAAATGG | | |
| CR003031 | ACTGTTGATTAGAGGTAGGGAAATGATTTTAATCTGTGA--------- | 1.33% | −9 |
| | ATGGGCAAGTAGCTATCTAATGACTAAAATGG | | |
| CR003031 | | . . . | . . . |
| CR003033 | ATGGGCAAGTAGCTATCTAATGACTAAAATGGAA---------- | 25.21% | −10 |
| | GAGAAACAGTTTTAGTATAACAAGTGAAATACCCAT | | |
| CR003033 | ATGGGCAAGTAGCTATCTAATGACTAAAATGGAAAAaCACTGGAAGAGAAACAGT | 7.77% | 1 |
| | TTTAGTATAACAAGTGAAATACCCAT | | |
| CR003033 | ATGGGCAAGTAGCTATCTAATGACTAAAATGGAA-- | 5.72% | −2 |
| | CACTGGAAGAGAAACAGTTTTAGTATAACAAGTGAAATACCCAT | | |
| CR003033 | ATGGGCAAGTAGCTATCTAATGACTAAAATGGAAAAC-- | 2.94% | −2 |
| | TGGAAGAGAAACAGTTTTAGTATAACAAGTGAAATACCCAT | | |
| CR003033 | ATGGGCAAGTAGCTATCTAATGACTAAAATGGAAAACcACTGGAAGAGAAACAGT | 1.68% | 1 |
| | TTTAGTATAACAAGTGAAATACCCAT | | |
| CR003033 | | . . . | . . . |
| CR003035 | CACTGGAAGAGAAACAGTTTTAGTATAACAAGTGAAATACCCATG--- | 10.87% | −3 |
| | AGTCTGAGGTGCCTATAGGACATCTATATAAA | | |
| CR003035 | CACTGGAAGAGAAACAGTTTTAGTATAACAAGTGAAATACCCAT- | 2.62% | −1 |
| | CTGAGTCTGAGGTGCCTATAGGACATCTATATAAA | | |
| CR003035 | CACTGGAAGAGAAACAGTTTTAGTATAACAAGTGAAATACCCA-- | 2.04% | −2 |
| | CTGAGTCTGAGGTGCCTATAGGACATCTATATAAA | | |
| CR003035 | CACTGGAAGAGAAACAGTTTTAGTATAACAAGTGAAATACCCATG-- | 1.79% | −2 |
| | GAGTCTGAGGTGCCTATAGGACATCTATATAAA | | |
| CR003035 | CACTGGAAGAGAAACAGTTTTAGTATAACAAGTGAAATACCC---- | 1.77% | −4 |
| | TGAGTCTGAGGTGCCTATAGGACATCTATATAAA | | |
| CR003035 | | . . . | . . . |
| CR003037 | TAACAAGTGAAATACCCATGCTGAGTCTGAGG---------- | 7.19% | −10 |
| | ACATCTATATAAATAAGCCCAGTACATTGTTTGATATA | | |
| CR003037 | TAACAAGTGAAATACCCATGCTGAGTCTGAGGTGCC- | 6.13% | −1 |
| | ATAGGACATCTATATAAATAAGCCCAGTACATTGTTTGATATA | | |
| CR003037 | TAACAAGTGAAATACCCATGCTGAGTCTGAGGTGCCcTATAGGACATCTATATAA | 4.17% | 1 |
| | ATAAGCCCAGTACATTGTTTGATATA | | |
| CR003037 | TAACAAGTGAAATACCCATGCTGAGTCTGAGGTGCCTtATAGGACATCTATATAA | 3.89% | 1 |
| | ATAAGCCCAGTACATTGTTTGATATA | | |
| CR003037 | TAACAAGTGAAATACCCATGCTGAGTCTGAGGTGC- | 3.72% | −1 |
| | TATAGGACATCTATATAAATAAGCCCAGTACATTGTTTGATATA | | |
| CR003037 | | . . . | . . . |
| CR003038 | TAGTATAACAAGTGAAATACCCATGCTGAGTCTGAGGTGCCTATA---------- | 14.85% | −11 |
| | -TAAATAAGCCCAGTACATTGTTTG | | |
| CR003038 | TAGTATAACAAGTGAAATACCCATGCTGAGTCTGAGGTGCCTATAG- | 6.25% | −1 |
| | ACATCTATATAAATAAGCCCAGTACATTGTTTG | | |
| CR003038 | TAGTATAACAAGTGAAATACCCATGCTGAGTCTGAGGTGCCTAT- | 3.99% | −1 |
| | GGACATCTATATAAATAAGCCCAGTACATTGTTTG | | |
| CR003038 | TAGTATAACAAGTGAAATACCCATGCTGAGTCTGAGGTGCCTATAGGgACATCTA | 2.83% | 1 |
| | TATAAATAAGCCCAGTACATTGTTTG | | |
| CR003038 | TAGTATAACAAGTGAAATACCCATGCTGAGTCTGAGGTGCCTATAaGGACATCTA | 2.76% | 1 |
| | TATAAATAAGCCCAGTACATTGTTTG | | |
| CR003038 | | . . . | . . . |
| CR003052 | TCAGAGGTTAGAAATCAGAGTTGGGAATTGGGATTA-- | 14.04% | −2 |
| | CAGGCTGTATTTAAGAGTTTAGATATAACTGTGAATCCAAGA | | |
| CR003052 | TCAGAGGTTAGAAATCAGAGTTGGGAATTGGGATTAaTACAGGCTGTATTTAAGA | 2.94% | 1 |
| | GTTTAGATATAACTGTGAATCCAAGA | | |
| CR003052 | TCAGAGGTTAGAAATCAGAGTTGGGAATTGGGATT- | 2.41% | −1 |
| | TACAGGCTGTATTTAAGAGTTTAGATATAACTGTGAATCCAAGA | | |
| CR003052 | TCAGAGGTTAGAAATCAGAGTTGGGAATTGGGATTATtACAGGCTGTATTTAAGA | 2.37% | 1 |
| | GTTTAGATATAACTGTGAATCCAAGA | | |
| CR003052 | TCAGAGGTTAGAAATCAGAGTTGGGAATTGGGATTAaaTACAGGCTGTATTTAAG | 2.28% | 2 |
| | AGTTTAGATATAACTGTGAATCCAAGA | | |
| CR003052 | | . . . | . . . |
| CR003085 | TGTAAGGAGGATGAGCCACATGGTATGGGAGGTAT- | 12.03% | −1 |
| | CTAAGGACTCTAGGGTCAGAGAAATATGGGTTATATCCTTCTAC | | |
| CR003085 | TGTAAGGAGGATGAGCCACATGGTATGGGAGG---------- | 8.70% | −10 |
| | ACTCTAGGGTCAGAGAAATATGGGTTATATCCTTCTAC | | |
| CR003085 | TGTAAGGAGGATGAGCCACATGGTATGGGA------------- | 4.42% | −13 |
| | CTCTAGGGTCAGAGAAATATGGGTTATATCCTTCTAC | | |
| CR003085 | TGTAAGGAGGATGAGCCACATGGTATGGGAGGTATAaCTAAGGACTCTAGGGTCA | 4.38% | 1 |
| | GAGAAATATGGGTTATATCCTTCTAC | | |
| CR003085 | TGTAAGGAGGATGAGCCACATGGTATGGGAGGTA----- | 3.41% | −5 |
| | AGGACTCTAGGGTCAGAGAAATATGGGTTATATCCTTCTAC | | |
| CR003085 | | . . . | . . . |
| CR003087 | GATGAGCCACATGGTATGGGAGGTATACTAAGGACTtCTAGGGTCAGAGAAATAT | 24.73% | 1 |
| | GGGTTATATCCTTCTACAAAATTCAC | | |
| CR003087 | GATGAGCCACATGGTATGGGAGGTATACTA--------- | 15.83% | −9 |
| | GGGTCAGAGAAATATGGGTTATATCCTTCTACAAAATTCAC | | |
| CR003087 | GATGAGCCACATGGTATGGGAGGTATACTAAGG-------- | 8.50% | −8 |
| | GTCAGAGAAATATGGGTTATATCCTTCTACAAAATTCAC | | |
| CR003087 | GATGAGCCACATGGTATGGGAGGTATACTAAGGACT-- | 7.07% | −2 |
| | AGGGTCAGAGAAATATGGGTTATATCCTTCTACAAAATTCAC | | |
| CR003087 | GATGAGCCACATGGTATGGGAGGTATACTAAGG--------- | 1.75% | −9 |
| | TCAGAGAAATATGGGTTATATCCTTCTACAAAATTCAC | | |
| CR003087 | | . . . | . . . |

[0775] These results support the conclusion from earlier experiments described herein that small indels (e.g., in this case, indels from 1-20 nucleotides) in the HPFH region targeted by the indicated gRNA molecule can have a significant impact on expression and production of HbF. An increase in HbF-containing erythrocytes derived from genome edited cells is likely to have therapeutic implications by reduced sickling.

### Example 4.3

[0776] Methods: Methods are as in Example 4, with the Following Exceptions.

[0777] Human CD34⁺ cell culture. Human CD34+ cells were expanded for 3 days prior to RNP delivery in expansion medium.

[0778] Assembly of Cas9 and guide RNA ribonucleoprotein (RNP) complexes, preparation of HSPC, and electroporation of RNP into HSPC. The HSPC collected by centrifugation were resuspended in P3 Primary Cell Solution (Lonza cat. No. PBP3-00675) at a cell density of 6.4×10⁶/mL. The RNP was mixed with 20 μL of cells by pipetting up and down and incubated at RT for 2 min. The RNP/cell mixture (20 μL) was electroporated using code CM-137 on the 4D-Nucleofector (Lonza). Electroporations were performed in duplicate. The Tracr was SEQ ID NO: 7808 and the crRNA had the following format with 2′O-Methyl (m) and Phosphorothioate Bond (*) modifications indicated: mN*mN*mN*rNrNrNrNrNrNrNrNrNrNrNrNrNrNrNrNrNrGrUrUrUrUrArGrArGrCrUrArU*mG*m C*mU, where N's are the nucleotides of the targeting domain.

[0779] In vitro erythropoiesis and FACS analysis for HbF containing erythroid cells. After electroporation, the cells were immediately transferred into pre-warmed medium consisting of EDM and supplements. During days 0-7 of culture, EDM was further supplemented with 1 μM hydrocortisone (Sigma. H8672), 100 ng/mL human SCF (Life Technologies, Cat. #PHC2113), and 5 ng/mL human IL-3 (Peprotech #10779-598). During days 7-11 of culture, EDM was supplemented with 100 ng/mL of human SCF only. During days 11-21 of culture, EDM had no additional supplements. Cell cultures were initiated at 2.6×10⁴ cells per ml on day 0, adjusted to 4.0×10⁴ cells per ml on day 7, and adjusted to 1.0×10⁶ cells per ml on day 11. On days 14 and 19, the media was replenished. Viable cells were counted at 1, 4, 7, 11, 14 and 21 days post-RNP delivery. All viable cell counts were determined by flow cytometry using AccuCheck Counting Beads (ThermoFisher cat. No. PCB100) with inviable cells discriminated by DAPI (4′,6-Diamidino-2-Phenylindole) staining. On days 7, 16 and 21 of the culture, the cells (1×10⁵) were analyzed by intracellular staining for HbF expression. On days 16 and 21 intracellular staining for HbF expression did not include anti-CD71 and anti-CD235a antibodies, and % of HbF positive cells (F-cells) in the entire viable cell population was reported. On day 21 LIVE/DEAD® Fixable Near-IR Dead Cell Stain (ThermoFisher L34975) was used as the viability dye.

[0780] Genomic DNA preparation and next generation sequencing (NGS). Genomic DNA was prepared from edited and unedited HSPC at 7 days post-electroporation using Quick Extract DNA Extraction Solution (Epicentre Cat # QE09050).

### Results:

[0781] Without being bound by theory, it is believed that targeted genetic disruption of the HPFH region will relieve repression of γ-globin expression, allowing production of the red blood cells containing elevated HbF protein, (cells expressing fetal hemoglobin are sometimes referred to herein as “F-cells”). The elevated HbF prevents sickling of the red blood cells under deoxygenated conditions and will be therapeutic/curative for the patients of both β-thalassemia and SCD. Autologous hematopoietic stem cell transplantation (HSCT) with ex vivo genome edited HSC from SCD patients was also combined with stem cell expansion enhancing technology, e.g., an aryl hydrocarbon receptor (AHR) inhibitor, e.g., as described in WO2010/059401 (the contents of which are incorporated by reference in their entirety), e.g., Compound 4 to improve ex vivo expansion and increase the dose of gene modified HSC delivered.

[0782] For efficient genome editing via programmable nuclease, Cas9, the successful delivery of guide RNA (gRNA) and Cas9 protein into target cells and tissues is essential. Recent reports demonstrated that Cas9 ribonucleoprotein (RNP) complexes when delivered into target cells by electroporation can accomplish efficient and specific genome editing in several different cell types. Cas9-RNP complexes cleave chromosomal DNA almost immediately after delivery and are degraded rapidly in cells, reducing off-target effects. In contrast, use of plasmid and viral vector systems used to deliver Cas9 results in prolonged expression of the enzyme aggravating off-target effects associated with the system. Additionally, delivery of RNPs into the target cells requires no additional tools which would greatly facilitate translation of genome editing for therapeutic purposes in the clinic. Purified recombinant Cas9 protein and gRNA complexes (RNPs) were delivered into cultured HSPC and an overview experiments used are shown in FIG. 17.

[0783] Recombinant Cas9 protein was purified from Escherichia coli and complexed with synthetic dual gRNAs (dgRNA) that consist of crRNA and tracr to generate ribonucleoprotein (RNP) complexes. The list of gRNAs used in the study are shown in Table 20. The RNP complexes were electroporated into CD34+ HSPC via electroporation as described under materials and methods. The cells were expanded prior to the delivery of RNP complexes. Actively dividing cells may facilitate uptake of RNP complexes delivered by electroporation.

TABLE 20
Relative viable cell proliferation in the current study. Individual
electroporation replicates are shown. All gRNA molecules were
tested in the dgRNA format using the tracr SEQ ID NO: 7808,
and the crRNA had the following format with 2′O-Methyl (m)
and Phosphorothioate Bond (*) modifications indicated:
mN*mN*mN*rNrNrNrNrNrNrNrNrNrNrNrNrNrNrNrNrNrGrUrUr-
UrUrArGrArGrCrUrArU*mG*m C*mU, where N's are the nucleotides
of the targeting domain. (n.d. not determined)

| Guide RNA targeting | | | | | | | |
|---|---|---|---|---|---|---|---|
| domain ID and replicate | Day 0 | Day 1 | Day 4 | Day 7 | Day 11 | Day 14 | Day 21 |
| CR001030 replicate 1 | 1 | 0.66 | 4.3 | 43.1 | 627 | 680 | 772 |
| CR001030 replicate 2 | 1 | 0.65 | 4.0 | 38.4 | 651 | 694 | 880 |
| CR001028 replicate 1 | 1 | 0.61 | 4.0 | 33.2 | 588 | 509 | 742 |
| CR001028 replicate 2 | 1 | 0.77 | 6.1 | 44.9 | 724 | 759 | 838 |
| CR001095 replicate 1 | 1 | 0.66 | 4.0 | 40.7 | 665 | 503 | 835 |
| CR001095 replicate 2 | 1 | 0.96 | 5.2 | 42.2 | 651 | 777 | n.d. |
| CR001212 replicate 1 | 1 | 0.58 | 3.4 | 33.6 | 465 | 414 | 495 |
| CR001212 replicate 2 | 1 | 0.74 | 3.6 | 32.4 | 490 | 519 | 572 |
| g8 replicate 1 | 1 | 0.61 | 4.4 | 31.8 | 221 | 341 | 91 |
| g8 replicate 2 | 1 | 0.60 | 5.2 | 33.2 | 269 | 270 | 103 |
| None/control replicate 1 | 1 | 0.79 | 7.6 | 58.5 | 741 | 862 | 707 |
| None/control replicate 2 | 1 | 0.71 | 8.2 | 51.4 | 923 | 1204 | 1075 |

[0784] The genome edited and unedited HSPC were analyzed for proliferation in a three-stage erythroid differentiation cell culture protocol. Percent cell recovery at 1 day after electroporation ranged from 58% to 96% and was similar across conditions, including the unedited but electroporated control (Table 20). Proliferation was suppressed in the cells edited by dgRNA including the targeting domain of g8 targeting exon 2 of BCL11A (10-12% of unedited control at day 21, Table 20), but proliferation of cells edited with the included HPFH region targeting dgRNAs was similar to control (47-99% of unedited control at day 21, Table 20).

TABLE 21
HbF induction in the current study. Individual electroporation replicates
are shown. All gRNA molecules were tested in the dgRNA format. All
gRNA molecules were tested in the dgRNA format using the tracr
SEQ ID NO: 7808, and the crRNA had the following format with 2′O-
Methyl (m) and Phosphorothioate Bond (*) modifications indicated:
mN*mN*mN*rNrNrNrNrNrNrNrNrNrNrNrNrNrNrNrNrNrGrUrUrUr
UrArGrArGrCrUrArU*mG*mC*mU, where N's are the nucleotides of
the targeting domain. (n.d. not determined)

| Guide RNA | | | | | |
|---|---|---|---|---|---|
| targeting | % | % | % HbF+ | % HbF+ | % HbF+ |
| domain | edited, | CD71+, | (F cells), | (F cells), | (F cells), |
| ID and replicate | Day 7 | Day 7 | Day 7 | Day 16 | Day 21 |
| CR001030 | 90.7 | 91.2 | 61.0 | 45.4 | 53.7 |
| replicate 1 | | | | | |
| CR001030 | 90.1 | 91.1 | 63.9 | 44.3 | 55.9 |
| replicate 2 | | | | | |
| CR001028 | 91.9 | 90.0 | 61.6 | 40.9 | 52.0 |
| replicate 1 | | | | | |
| CR001028 | 87.6 | 90.7 | 56.3 | 46.6 | 45.8 |
| replicate 2 | | | | | |
| CR001095 | 25.7 | 91.4 | 51.3 | 36.8 | 43.7 |
| replicate 1 | | | | | |
| CR001095 | 30.5 | 91.1 | 52.5 | 42.7 | n.d. |
| replicate 2 | | | | | |
| CR001212 | 86.2 | 90.8 | 57.5 | 38.7 | 45.2 |
| replicate 1 | | | | | |
| CR001212 | 80.9 | 90.4 | 54.7 | 36.5 | 42.7 |
| replicate 2 | | | | | |
| g8 replicate 1 | 95.3 | 84.6 | 70.7 | 71.9 | 63.4 |
| g8 replicate 2 | 94.3 | 82.6 | 70.0 | 72.6 | 54.8 |
| None/control | n/a | 94.0 | 27.1 | 24.4 | 22.8 |
| replicate 1 | | | | | |
| None/control | n/a | 93.8 | 26.2 | 25.7 | 21.1 |
| replicate 2 | | | | | |

[0785] The genome edited and unedited HSPC were analyzed by flow cytometry for expression levels of fetal globin and two erythroid cell surface markers, transferrin receptor (CD71) and glycophorin A (CD235a) using antibodies conjugated to fluorescent dyes. The live cells were identified and gated by exclusion of Live/Dead Fixable Dead Cell Stain. Genome editing did not adversely affect erythroid differentiation as the cultured cells showed percentages of CD71+ cells consistent with erythroblasts similar to uneditied cells at day 7 of differentiation. Cultures treated with the included HPFH region targeting dgRNAs resulted in increased percentage of erythroid cells containing HbF compared to mock electroporated cells throughout the 21 day culture period (Table 21). Induction of HbF positive cells by dgRNA including the targeting domain of g8 targeting exon 2 of BCL11A was also observed in parallel. Genomic PCR products of the HPFH region were also subjected to next generation sequencing (NGS) to determine the percentage of edited alleles in the cell population. Genome editing at the HFPH locus was observed in cell cultures electroporated with RNPs containing Cas9, crRNA of the given targeting domain and Tracr (Table 21), but not in control cells with no targeting domain delivered (RNPs containing only Cas9 and Tmcr). An increase in HbF-containing erythrocytes derived from genome edited cells is likely to have therapeutic implications by reduced sickling.

### Example 4.4

[0786] Methods: Methods are as in Example 4, with the Following Exceptions.

[0787] Human CD34⁺ cell culture Human CD34+ cells were expanded for 3 to 6 days prior to RNP delivery in expansion medium, depending on study.

[0788] Assembly of Cas9 and guide RNA ribonucleoprotein (RNP) complexes, preparation of HSPC, and electroporation of RNP into HSPC. For some studies, the RNP complexes were delivered using the 4D-Nucleofector (Lonza). In those studies, the HSPC collected by centrifugation were resuspended in P3 Primary Cell Solution (Lonza cat. No. PBP3-00675) at a cell density of 2.2×10⁶/mL to 6.4×10⁶/mL, depending on study. The RNP was mixed with 20 μL of cells by pipetting up and down and incubated at RT for 2 min. The RNP/cell mixture (20 μL) was electroporated using code CM-137 on the 4D-Nucleofector (Lonza). Electroporations were performed in duplicate. The dgRNA format varied between studies and is indicated in Table 22 by the following notation. Form A is the dgRNA format described above in Example 1, with the targeting domain sequence indicated. Form B is a dgRNA format using a crRNA of rNrNrNrNrNrNrNrNrNrNrNrNrNrNrNrNrNrNrNrNrGrUrUrUrUrArGrArGrCrUrArUrGrCrU, where r indicates an RNA base and the N's correspond to the indicated targeting domain sequence, and a tracr consisting of SEQ ID NO: 7808. Form C is a dgRNA format using crRNA of the sequence mN*mN*mN*rNrNrNrNrNrNrNrNrNrNrNrNrNrNrNrNrNrGrUrUrUrUrArGrArGrCrUrArU*mG*m C*mU, where r indicates an RNA base, N's corresponds to the indicated targeting domain sequence, m indicates a base with 20-Methyl modification, and * indicates a phosphorothioate bond, and the tracr consists of SEQ ID NO: 7808.

[0789] In vitro erythropoiesis and FACS analysis for HbF containing erythroid cells. In one study, cell cultures were initiated at 2.6×10⁴ cells per ml on day 0. For those initiated by seeding directly into 250 μl (as described in Example 4), the cell culture was diluted in fresh medium after 1 to 3 days, depending on the study.

[0790] Genomic DNA preparation and next generation sequencing (NGS). Genomic DNA was prepared from edited and unedited HSPC at 24 hours to 7 days post-electroporation, depending on the study, using Quick Extract DNA Extraction Solution (Epicentre Cat # QE09050).

### Results:

[0791] Without being bound by theory, it is believed that targeted genetic disruption of the HPFH region will relieve repression of γ-globin expression, allowing production of the red blood cells containing elevated HbF protein, (cells expressing fetal hemoglobin are sometimes referred to herein as “F-cells”). The elevated HbF prevents sickling of the red blood cells under deoxygenated conditions and will be therapeutic/curative for the patients of both β-thalassemia and SCD. Autologous hematopoietic stem cell transplantation (HSCT) with ex vivo genome edited HSC from SCD patients was also combined with stem cell expansion enhancing technology, e.g., an aryl hydrocarbon receptor (AHR) inhibitor, e.g., as described in WO2010/059401 (the contents of which are incorporated by reference in their entirety), e.g., Compound 4 to improve ex vivo expansion and increase the dose of gene modified HSC delivered.

[0792] For efficient genome editing via programmable nuclease, Cas9, the successful delivery of guide RNA (gRNA) and Cas9 protein into target cells and tissues is essential. Recent reports demonstrated that Cas9 ribonucleoprotein (RNP) complexes when delivered into target cells by electroporation can accomplish efficient and specific genome editing in several different cell types. Cas9-RNP complexes cleave chromosomal DNA almost immediately after delivery and are degraded rapidly in cells, reducing off-target effects. In contrast, use of plasmid and viral vector systems used to deliver Cas9 results in prolonged expression of the enzyme aggravating off-target effects associated with the system. Additionally, delivery of RNPs into the target cells requires no additional tools which would greatly facilitate translation of genome editing for therapeutic purposes in the clinic. Purified recombinant Cas9 protein and gRNA complexes (RNPs) were delivered into cultured HSPC and an overview experiments used are shown in FIG. 17.

[0793] Recombinant Cas9 protein was purified from Escherichia coli and complexed with synthetic dual gRNAs (dgRNA) that consist of crRNA and tracr to generate ribonucleoprotein (RNP) complexes. The list of gRNAs used in the studies are shown in Table 22. The RNP complexes were electroporated into CD34+ HSPC via electroporation as described under materials and methods. The cells were expanded prior to the delivery of RNP complexes. Actively dividing cells may facilitate uptake of RNP complexes delivered by electroporation.

TABLE 22
Summary data for multiple studies evaluating indicated
gRNAs targeting the HPFH region and controls. All gRNA
molecules were tested in dgRNA formats. Details of the
dgRNA formats in the indicated studies are specified as
described above. Note that evaluations 4 and 5 were
performed in parallel and thus share control conditions.

| Guide RNA | | | | | | | | | |
|---|---|---|---|---|---|---|---|---|---|
| targeting | | Evaluation number | | | | | | | |
| domain ID | | 1 | 2 | 3 | 4 | 5 | 6 | 7 | 8 |
| CR001028 | Format | A | A | B | B | C | | | C |
| | Replicates | 2 | 2 | 2 | 2 | 2 | | | 2 |
| | % HbF+ (F cells), | 42.9 | 39.7 | 47.4 | 51.1 | 55.3 | | | 59.0 |
| | average of replicates | | | | | | | | |
| | % edited, average of | 91.7 | 78.0 | 87.5 | 90.9 | 84.6 | | | 89.8 |
| | replicates | | | | | | | | |
| CR001030 | Format | A | A | B | B | C | C | C | C |
| | Replicates | 2 | 2 | 2 | 2 | 2 | 2 | 2 | 2 |
| | % HbF+ (F cells), | 51.4 | 48.7 | 50.9 | 51.8 | 58.0 | 39.7 | 50.6 | 62.5 |
| | average of replicates | | | | | | | | |
| | % edited, average of | 84.5 | 61.8 | 74.3 | 75.0 | 85.6 | 94.1 | 85.4 | 90.4 |
| | replicates | | | | | | | | |
| CR001036 | Format | A | A | B | | | | | |
| | Replicates | 2 | 2 | 2 | | | | | |
| | % HbF+ (F cells), | 42.4 | 40.8 | 43.3 | | | | | |
| | average of replicates | | | | | | | | |
| | % edited, average of | 84.4 | 78.3 | 92.6 | | | | | |
| | replicates | | | | | | | | |
| CR001043 | Format | A | A | B | | | | | |
| | Replicates | 2 | 2 | 2 | | | | | |
| | % HbF+ (F cells), | 44.8 | 33.0 | 42.9 | | | | | |
| | average of replicates | | | | | | | | |
| | % edited, average of | 80.0 | 42.7 | 87.7 | | | | | |
| | replicates | | | | | | | | |
| CR001080 | Format | A | A | | | C | | | |
| | Replicates | 2 | 2 | | | 2 | | | |
| | % HbF+ (F cells), | 39.2 | 34.9 | | | 49.3 | | | |
| | average of replicates | | | | | | | | |
| | % edited, average of | 32.4 | 24.0 | | | 41.6 | | | |
| | replicates | | | | | | | | |
| CR001095 | Format | A | A | B | B | C | C | C | C |
| | Replicates | 2 | 2 | 1 | 2 | 2 | 2 | 2 | 2 |
| | % HbF+ (F cells), | 49.3 | 41.5 | 47 | 51.8 | 51.8 | 32.9 | 46.8 | 51.9 |
| | average of replicates | | | | | | | | |
| | % edited, average of | 66.1 | 49.8 | 65.1 | 64.6 | 64.2 | 66.8 | 56.1 | 28.1 |
| | replicates | | | | | | | | |
| CR001137 | Format | A | A | | | | C | C | |
| | Replicates | 2 | 2 | | | | 2 | 2 | |
| | % HbF+ (F cells), | 34.8 | 45.6 | | | | 31.0 | 40.8 | |
| | average of replicates | | | | | | | | |
| | % edited, average of | 41.5 | 46.9 | | | | 69.0 | 57.9 | |
| | replicates | | | | | | | | |
| CR001142 | Format | A | A | | | C | | | |
| | Replicates | 2 | 2 | | | 2 | | | |
| | % HbF+ (F cells), | 43.4 | 45.5 | | | 48.1 | | | |
| | average of replicates | | | | | | | | |
| | % edited, average of | 76.9 | 63.7 | | | 89.2 | | | |
| | replicates | | | | | | | | |
| CR001158 | Format | A | A | | | C | | | |
| | Replicates | 2 | 2 | | | 2 | | | |
| | % HbF+ (F cells), | 41.7 | 36.9 | | | 44.6 | | | |
| | average of replicates | | | | | | | | |
| | % edited, average of | 72.4 | 43.9 | | | 78.4 | | | |
| | replicates | | | | | | | | |
| CR001212 | Format | A | A | B | B | C | C | C | C |
| | Replicates | 2 | 2 | 2 | 2 | 2 | 2 | 2 | 2 |
| | % HbF+ (F cells), | 42.6 | 46.9 | 43.8 | 44.5 | 53.5 | 39.4 | 47.1 | 56.1 |
| | average of replicates | | | | | | | | |
| | % edited, average of | 81.6 | 58.1 | 48.6 | 47.5 | 69.2 | 82.0 | 67.0 | 83.6 |
| | replicates | | | | | | | | |
| CR001217 | Format | A | A | | | | C | C | |
| | Replicates | 2 | 2 | | | | 2 | 2 | |
| | % HbF+ (F cells), | 40.1 | 41.5 | | | | 29.9 | 45.9 | |
| | average of replicates | | | | | | | | |
| | % edited, average of | 80.9 | 50.3 | | | | 89.0 | 82.1 | |
| | replicates | | | | | | | | |
| CR001221 | Format | A | A | B | B | C | | | |
| | Replicates | 2 | 2 | 1 | 2 | 2 | | | |
| | % HbF+ (F cells), | 41.8 | 45.2 | 44.6 | 46.2 | 48.6 | | | |
| | average of replicates | | | | | | | | |
| | % edited, average of | 83.9 | 71.1 | 73.6 | 70.7 | 92.1 | | | |
| | replicates | | | | | | | | |
| g8 | Format | C | C | C | C | C | | C | C |
| | Replicates | 16 | 2 | 2 | 2 | 2 | | 2 | 2 |
| | % HbF+ (F cells), | 59.2 | 60.0 | 66.3 | 64.7 | 64.7 | | 55.8 | 70.4 |
| | average of replicates | | | | | | | | |
| | % edited, average of | 95.1 | 85.4 | 94.2 | 94.6 | 94.6 | | 91.7 | 94.8 |
| | replicates | | | | | | | | |
| None/control | Format | n/a | n/a | n/a | n/a | n/a | n/a | n/a | n/a |
| | Replicates | 16 | 2 | 2 | 2 | 2 | 2 | 2 | 2 |
| | % HbF+ (F cells), | 21.0 | 20.3 | 22.4 | 22.4 | 22.4 | 13.9 | 24.0 | 26.7 |
| | average of replicates | | | | | | | | |
| | % edited, average of | n/a | n/a | n/a | n/a | n/a | n/a | n/a | n/a |
| | replicates | | | | | | | | |

[0794] The genome edited and unedited HSPC were analyzed by flow cytometry for expression levels of fetal globin and two erythroid cell surface markers, transferrin receptor (CD71) and glycophorin A (CD235a) using antibodies conjugated to fluorescent dyes. The live cells were identified and gated by exclusion of Live Dead Violet. HPFH region targeting resulted in increased percentage of erythroid cells containing HbF compared to mock electroporated cells, a consistent result across multiple evaluations and dgRNA formats (Table 22). In some instances, an increase in % HbF+ cells was associated with a particular dgRNA form, for example Form C for CR001028 (Table 22). Induction of HbF positive cells by dgRNA including the targeting domain of g8 targeting exon 2 of BCL11A was also observed in parallel. Genomic PCR products of the HPFH region were also subjected to next generation sequencing (NGS) to determine the percentage of edited alleles in the cell population. Genome editing at the HFPH locus was observed in cell cultures electroporated with RNPs containing Cas9, crRNA of the given targeting domain and Tracr (Table 22), but not in control cells with no targeting domain delivered (RNPs containing only Cas9 and Tracr).

[0795] Finally, the indel pattern as well as frequency of each indel was assessed for each gRNA by NGS. The most frequently occurring indels at each target site are shown in Table 26.

TABLE 26
5 most frequent indels at each taget sequence after exposure to RNP comprising the
indicated gRNA molecule. Each gRNA was tested in dgRNA format in two separate experiments,
and the results are shown seperately for each experiment. Capital letters are the naturally
occurring nucleotides at and near the target sequence. Deletions relative to the unmodified
target sequence are shown as “—”; insertions are shown as lowercase letters.

| | dgRNA | | | |
|---|---|---|---|---|
| Experiment | targeting | | % of all | Indel |
| Number | domain | Variant Read (Genomic Sequence) | reads | Length |
| 1 | CR001028 | TTCTGTCATGTGTGTCTTGACTCAGAAACCCTGTTCTCCTCTA- | 13.26% | −1 |
| | | ATATCTCCCCACCGCATCTCTTTCAGCAGTTGTTTC | | |
| 1 | CR001028 | TTCTGTCATGTGTGTCTTGACTCAGAAACCCTGTTCTCC------------- | 12.48% | −13 |
| | | CCACCGCATCTCTTTCAGCAGTTGTTTC | | |
| 1 | CR001028 | TTCTGTCATGTGTGTCTTGACTCAGAAACCCTGTTCTCCTCTA---- | 6.04% | −4 |
| | | TCTCCCCACCGCATCTCTTTCAGCAGTTGTTTC | | |
| 1 | CR001028 | TTCTGTCATGTGTGTCTTGACTCAGAAACCCTGTTCTCCTCTA-- | 3.94% | −2 |
| | | TATCTCCCCACCGCATCTCTTTCAGCAGTTGTTTC | | |
| 1 | CR001028 | TTCTGTCATGTGTGTCTTGACTCAGAAACCCTGTTCTCCTC------------- | 3.65% | −13 |
| | | ACCGCATCTCTTTCAGCAGTTGTTTC | | |
| 1 | CR001028 | | . . . | . . . |
| 2 | CR001028 | TTCTGTCATGTGTGTCTTGACTCAGAAACCCTGTTCTCC------------- | 14.30% | −13 |
| | | CCACCGCATCTCTTTCAGCAGTTGTTTC | | |
| 2 | CR001028 | TTCTGTCATGTGTGTCTTGACTCAGAAACCCTGTTCTCCTCTA- | 11.51% | −1 |
| | | ATATCTCCCCACCGCATCTCTTTCAGCAGTTGTTTC | | |
| 2 | CR001028 | TTCTGTCATGTGTGTCTTGACTCAGAAACCCTGTTCTCCTCTA-- | 5.63% | −2 |
| | | TATCTCCCCACCGCATCTCTTTCAGCAGTTGTTTC | | |
| 2 | CR001028 | TTCTGTCATGTGTGTCTTGACTCAGAAACCCTGTTCTCCTCTA---- | 4.98% | −4 |
| | | TCTCCCCACCGCATCTCTTTCAGCAGTTGTTTC | | |
| 2 | CR001028 | TTCTGTCATGTGTGTCTTGACTCAGAAACCCTGTTCTCCTC------------- | 4.91% | −13 |
| | | ACCGCATCTCTTTCAGCAGTTGTTTC | | |
| 2 | CR001028 | | . . . | . . . |
| 1 | CR001030 | TCTTGACTCAGAAACCCTGTTCTCCTCTACATATCTC------------- | 9.10% | −13 |
| | | TTTCAGCAGTTGTTTCTAAAAATATCCTCC | | |
| 1 | CR001030 | TCTTGACTCAGAAACCCTGTTCTCCTCTACATATCTCCCCACC- | 4.77% | −1 |
| | | CATCTCTTTCAGCAGTTGTTTCTAAAAATATCCTCC | | |
| 1 | CR001030 | TCTTGACTCAGAAACCCTGTTCTCCTCTACATATCTCCCCACC-- | 3.54% | −2 |
| | | ATCTCTTTCAGCAGTTGTTTCTAAAAATATCCTCC | | |
| 1 | CR001030 | TCTTGACTCAGAAACCCTGTTCTCCTCTACATATCTCCCCACCGgCATCTCTTTCA | 2.51% | 1 |
| | | GCAGTTGTTTCTAAAAATATCCTCC | | |
| 1 | CR001030 | TCTTGACTCAGAAACCCTGTTCTCCTCTACATATCTCCCCA----- | 2.39% | −5 |
| | | TCTCTTTCAGCAGTTGTTTCTAAAAATATCCTCC | | |
| 1 | CR001030 | | . . . | . . . |
| 2 | CR001030 | TCTTGACTCAGAAACCCTGTTCTCCTCTACATATCTC------------- | 9.67% | −13 |
| | | TTTCAGCAGTTGTTTCTAAAAATATCCTCC | | |
| 2 | CR001030 | TCTTGACTCAGAAACCCTGTTCTCCTCTACATATCTCCCCACC- | 4.87% | −1 |
| | | CATCTCTTTCAGCAGTTGTTTCTAAAAATATCCTCC | | |
| 2 | CR001030 | TCTTGACTCAGAAACCCTGTTCTCCTCTACATATCTCCCCACC-- | 3.33% | −2 |
| | | ATCTCTTTCAGCAGTTGTTTCTAAAAATATCCTCC | | |
| 2 | CR001030 | TCTTGACTCAGAAACCCTGTTCTCCTCTACATATCTCCCCACCGgCATCTCTTTCA | 2.93% | 1 |
| | | GCAGTTGTTTCTAAAAATATCCTCC | | |
| 2 | CR001030 | TCTTGACTCAGAAACCCTGTTCTCCTCTACATATCTCCCCAC- | 1.85% | −1 |
| | | GCATCTCTTTCAGCAGTTGTTTCTAAAAATATCCTCC | | |
| 2 | CR001030 | | . . . | . . . |
| 1 | CR001036 | CCTAGTTTCATTTTTGCAGAAGTGTTTTAGGCTAAT- | 19.08% | −1 |
| | | TAGTGGAATGTATCTTAGAGTTTAACTTATTTGTTTCTGTCAC | | |
| 1 | CR001036 | CCTAGTTTCATTTTTGCAGAAGTGTTTTAGGCTAATA-- | 17.13% | −2 |
| | | GTGGAATGTATCTTAGAGTTTAACTTATTTGTTTCTGTCAC | | |
| 1 | CR001036 | CCTAGTTTCATTTTTGCAGAAGTGTTTTAG---------- | 3.55% | −10 |
| | | TGGAATGTATCTTAGAGTTTAACTTATTTGTTTCTGTCAC | | |
| 1 | CR001036 | CCTAGTTTCATTTTTGCAGAAGTGTTTTAGGCTAATAaTAGTGGAATGTATCTTAG | 2.42% | 1 |
| | | AGTTTAACTTATTTGTTTCTGTCAC | | |
| 1 | CR001036 | CCTAGTTTCATTTTTGCAGAAGTGTTTTAGGCTAATA- | 2.38% | −1 |
| | | AGTGGAATGTATCTTAGAGTTTAACTTATTTGTTTCTGTCAC | | |
| 1 | CR001036 | | . . . | . . . |
| 2 | CR001036 | CCTAGTTTCATTTTTGCAGAAGTGTTTTAGGCTAATA-- | 22.26% | −2 |
| | | GTGGAATGTATCTTAGAGTTTAACTTATTTGTTTCTGTCAC | | |
| 2 | CR001036 | CCTAGTTTCATTTTTGCAGAAGTGTTTTAGGCTAAT- | 19.77% | −1 |
| | | TAGTGGAATGTATCTTAGAGTTTAACTTATTTGTTTCTGTCAC | | |
| 2 | CR001036 | CCTAGTTTCATTTTTGCAGAAGTGTTTTAG---------- | 6.25% | −10 |
| | | TGGAATGTATCTTAGAGTTTAACTTATTTGTTTCTGTCAC | | |
| 2 | CR001036 | CCTAGTTTCATTTTTGCAGAAGTGTTTTAGGCTAATA- | 1.96% | −1 |
| | | AGTGGAATGTATCTTAGAGTTTAACTTATTTGTTTCTGTCAC | | |
| 2 | CR001036 | CCTAGTTTCATTTTTGCAGAAGTGTTTTAGG------------ | 1.41% | −12 |
| | | AATGTATCTTAGAGTTTAACTTATTTGTTTCTGTCAC | | |
| 2 | CR001036 | | . . . | . . . |
| 1 | CR001043 | TAGAGATTTTTGTCTCCAAGGGAATTTTGAGAGGTTG- | 5.28% | −1 |
| | | AATGGACAAATCTATTGCTGCAGTTTAAACTTGCTTGCTTCC | | |
| 1 | CR001043 | TAGAGATTTTTGTCTCCAAGGGAATTTTGAGAGGTTGGA----- | 2.67% | −5 |
| | | CAAATCTATTGCTGCAGTTTAAACTTGCTTGCTTCC | | |
| 1 | CR001043 | TAGAGATTTTTGTCTCCAAGGGAATTTTGA--------- | 2.62% | −9 |
| | | ATGGACAAATCTATTGCTGCAGTTTAAACTTGCTTGCTTCC | | |
| 1 | CR001043 | TAGAGATTTTTGTCTCCAAGGGAATTTTGAGAGG--------- | 2.22% | −9 |
| | | ACAAATCTATTGCTGCAGTTTAAACTTGCTTGCTTCC | | |
| 1 | CR001043 | TAGAGATTTTTGTCTCCAAGGGAATTTTGAGAGGTTGGgAATGGACAAATCTATTG | 2.06% | 1 |
| | | CTGCAGTTTAAACTTGCTTGCTTCC | | |
| 1 | CR001043 | | . . . | . . . |
| 2 | CR001043 | TAGAGATTTTTGTCTCCAAGGGAATTTTGAGAGGTTG- | 5.87% | −1 |
| | | AATGGACAAATCTATTGCTGCAGTTTAAACTTGCTTGCTTCC | | |
| 2 | CR001043 | TAGAGATTTTTGTCTCCAAGGGAATTTTGAGAGG--------- | 3.11% | −9 |
| | | ACAAATCTATTGCTGCAGTTTAAACTTGCTTGCTTCC | | |
| 2 | CR001043 | TAGAGATTTTTGTCTCCAAGGGAATTTTGAGAGGTTGGA----- | 2.42% | −5 |
| | | CAAATCTATTGCTGCAGTTTAAACTTGCTTGCTTCC | | |
| 2 | CR001043 | TAGAGATTTTTGTCTCCAAGGGAATTTTGAGAGGTTGGgAATGGACAAATCTATTG | 1.90% | 1 |
| | | CTGCAGTTTAAACTTGCTTGCTTCC | | |
| 2 | CR001043 | TAGAGATTTTTGTCTCCAAGGGAATTTTGA--------- | 1.72% | −9 |
| | | ATGGACAAATCTATTGCTGCAGTTTAAACTTGCTTGCTTCC | | |
| 2 | CR001043 | | . . . | . . . |
| 1 | CR001080 | GAGAAAGGAAGGAAGGAAGAGGGGAAGAGAGAGGATG- | 2.72% | −1 |
| | | AAGGGATGGAGGAGAAGAAGGAAAAATAAATAATGGAGAGGA | | |
| 1 | CR001080 | GAGAAAGGAAGGAAGGAAGAGGGGAAGAGAGAGGATGGA--------- | 2.22% | −9 |
| | | GGAGAAGAAGGAAAAATAAATAATGGAGAGGA | | |
| 1 | CR001080 | GAGAAAGGAAGGAAGGAAGAGGGGAAGAGAGAGG-------- | 1.44% | −8 |
| | | GATGGAGGAGAAGAAGGAAAAATAAATAATGGAGAGGA | | |
| 1 | CR001080 | GAGAAAGGAAGGAAGGAAGAGGGGAAGAGAGAGGATGGgAAGGGATGGAGGAGAAG | 1.41% | 1 |
| | | AAGGAAAAATAAATAATGGAGAGGA | | |
| 1 | CR001080 | GAGAAAGGAAGGAAGGAAGAGGGGAAGAGAGAGGA---- | 1.11% | −4 |
| | | AGGGATGGAGGAGAAGAAGGAAAAATAAATAATGGAGAGGA | | |
| 1 | CR001080 | | . . . | . . . |
| 2 | CR001080 | GAGAAAGGAAGGAAGGAAGAGGGGAAGAGAGAGGATGGA--------- | 3.43% | −9 |
| | | GGAGAAGAAGGAAAAATAAATAATGGAGAGGA | | |
| 2 | CR001080 | GAGAAAGGAAGGAAGGAAGAGGGGAAGAGAGAGGATG- | 3.17% | −1 |
| | | AAGGGATGGAGGAGAAGAAGGAAAAATAAATAATGGAGAGGA | | |
| 2 | CR001080 | GAGAAAGGAAGGAAGGAAGAGGGGAAGAGA--------- | 1.61% | −9 |
| | | AGGGATGGAGGAGAAGAAGGAAAAATAAATAATGGAGAGGA | | |
| 2 | CR001080 | GAGAAAGGAAGGAAGGAAGAGGGGAAGAGAGAGGA---- | 1.28% | −4 |
| | | AGGGATGGAGGAGAAGAAGGAAAAATAAATAATGGAGAGGA | | |
| 2 | CR001080 | GAGAAAGGAAGGAAGGAAGAGGGGAAGAGAGAGG-------- | 1.16% | −8 |
| | | GATGGAGGAGAAGAAGGAAAAATAAATAATGGAGAGGA | | |
| 2 | CR001080 | | . . . | . . . |
| 1 | CR001095 | GAGAAAGAGAAAGGGAAGGGAAGAGAGGAAAGAAGA-- | 5.94% | −2 |
| | | AGAGGAGAGAAAAGAAACGAAGAGAGGGGAAGGGAAGGAAAA | | |
| 1 | CR001095 | GAGAAAGAGAAAGGGAAGGGAAGAGAGGAAAGAAGAG----- | 5.54% | −5 |
| | | GAGAGAAAAGAAACGAAGAGAGGGGAAGGGAAGGAAAA | | |
| 1 | CR001095 | GAGAAAGAGAAAGGGAAGGGAAGAGAGGA--------------- | 4.02% | −15 |
| | | GAGAAAAGAAACGAAGAGAGGGGAAGGGAAGGAAAA | | |
| 1 | CR001095 | GAGAAAGAGAAAGGGAAGGGAAGAGAGGAAAGAA-------------------- | 3.23% | −20 |
| | | ACGAAGAGAGGGGAAGGGAAGGAAAA | | |
| 1 | CR001095 | GAGAAAGAGAAAGGGAAGGGAAGAGAGGAAAGA-------- | 2.49% | −8 |
| | | GGAGAGAAAAGAAACGAAGAGAGGGGAAGGGAAGGAAAA | | |
| 1 | CR001095 | | . . . | . . . |
| 2 | CR001095 | GAGAAAGAGAAAGGGAAGGGAAGAGAGGAAAGAAGAG----- | 7.89% | −5 |
| | | GAGAGAAAAGAAACGAAGAGAGGGGAAGGGAAGGAAAA | | |
| 2 | CR001095 | GAGAAAGAGAAAGGGAAGGGAAGAGAGGAAAGAAGA-- | 6.18% | −2 |
| | | AGAGGAGAGAAAAGAAACGAAGAGAGGGGAAGGGAAGGAAAA | | |
| 2 | CR001095 | GAGAAAGAGAAAGGGAAGGGAAGAGAGGA--------------- | 4.16% | −15 |
| | | GAGAAAAGAAACGAAGAGAGGGGAAGGGAAGGAAAA | | |
| 2 | CR001095 | GAGAAAGAGAAAGGGAAGGGAAGAGAGGAAAGAAGAGgAAGAGGAGAGAAAAGAAA | 2.77% | 1 |
| | | CGAAGAGAGGGGAAGGGAAGGAAAA | | |
| 2 | CR001095 | GAGAAAGAGAAAGGGAAGGGA-------------------- | 1.98% | −20 |
| | | GGAGAGAAAAGAAACGAAGAGAGGGGAAGGGAAGGAAAA | | |
| 2 | CR001095 | | . . . | . . . |
| 1 | CR001137 | AAATGCTTATGACAGCAATAATCATAAAAACCTCAAACC------- | 6.73% | −7 |
| | | ACTTAAATGCTTACCAACAGTAGAATTGATAAAT | | |
| 1 | CR001137 | AAATGCTTATGACAGCAATAATCATAAAAACCTCAAACCGGTAGgCCACTTAAATG | 4.02% | 1 |
| | | CTTACCAACAGTAGAATTGATAAAT | | |
| 1 | CR001137 | AAATGCTTATGACAGCAATAATCATAAAAACCTCAAACCGGTAaGCCACTTAAATG | 2.87% | 1 |
| | | CTTACCAACAGTAGAATTGATAAAT | | |
| 1 | CR001137 | AAATGCTTATGACAGCAATAATCATAAAAACCTCA-------- | 1.71% | −8 |
| | | GCCACTTAAATGCTTACCAACAGTAGAATTGATAAAT | | |
| 1 | CR001137 | AAATGCTTATGACAGCAATAATCATAAAAACC-------------- | 0.95% | −14 |
| | | ACTTAAATGCTTACCAACAGTAGAATTGATAAAT | | |
| 1 | CR001137 | | . . . | . . . |
| 2 | CR001137 | AAATGCTTATGACAGCAATAATCATAAAAACCTCAAACC------- | 7.25% | −7 |
| | | ACTTAAATGCTTACCAACAGTAGAATTGATAAAT | | |
| 2 | CR001137 | AAATGCTTATGACAGCAATAATCATAAAAACCTCAAACCGGTAGgCCACTTAAATG | 3.44% | 1 |
| | | CTTACCAACAGTAGAATTGATAAAT | | |
| 2 | CR001137 | AAATGCTTATGACAGCAATAATCATAAAAACCTCAAACCGGTAaGCCACTTAAATG | 2.50% | 1 |
| | | CTTACCAACAGTAGAATTGATAAAT | | |
| 2 | CR001137 | AAATGCTTATGACAGCAATAATCATAAAAACCTCAAACCGGTA-------- | 1.37% | −8 |
| | | AATGCTTACCAACAGTAGAATTGATAAAT | | |
| 2 | CR001137 | AAATGCTTATGACAGCAATAATCATAAAAACCTCAAACCGGT------- | 1.11% | −7 |
| | | TAAATGCTTACCAACAGTAGAATTGATAAAT | | |
| 2 | CR001137 | | . . . | . . . |
| 1 | CR001142 | AAATGCATTTTACAGCATTTGGTTGATTAAAAGTAACCcAGAGGTGAGTTCAAACT | 8.00% | 1 |
| | | ATATGACTTTATTTGTATATAGAAA | | |
| 1 | CR001142 | AAATGCATTTTACAGCATTTGGTTGATTAAAAG------- | 6.63% | −7 |
| | | AGGTGAGTTCAAACTATATGACTTTATTTGTATATAGAAA | | |
| 1 | CR001142 | AAATGCATTTTACAGCATTTGGTTGATTAAAAGTAAC- | 2.86% | −1 |
| | | AGAGGTGAGTTCAAACTATATGACTTTATTTGTATATAGAAA | | |
| 1 | CR001142 | AAATGCATTTTACAGCATTTGGTTGATTAAAAG--------- | 2.03% | −9 |
| | | GTGAGTTCAAACTATATGACTTTATTTGTATATAGAAA | | |
| 1 | CR001142 | AAATGCATTTTACAGCATTTGGTTGA-------------------- | 1.71% | −20 |
| | | GTTCAAACTATATGACTTTATTTGTATATAGAAA | | |
| 1 | CR001142 | | . . . | . . . |
| 2 | CR001142 | AAATGCATTTTACAGCATTTGGTTGATTAAAAGTAACCcAGAGGTGAGTTCAAACT | 9.94% | 1 |
| | | ATATGACTTTATTTGTATATAGAAA | | |
| 2 | CR001142 | AAATGCATTTTACAGCATTTGGTTGATTAAAAG------- | 5.81% | −7 |
| | | AGGTGAGTTCAAACTATATGACTTTATTTGTATATAGAAA | | |
| 2 | CR001142 | AAATGCATTTTACAGCATTTGGTTGATTAAAAGTAAC- | 4.19% | −1 |
| | | AGAGGTGAGTTCAAACTATATGACTTTATTTGTATATAGAAA | | |
| 2 | CR001142 | AAATGCATTTTACAGCATTTGGTTGATTAAAAG--------- | 2.59% | −9 |
| | | GTGAGTTCAAACTATATGACTTTATTTGTATATAGAAA | | |
| 2 | CR001142 | AAATGCATTTTACAGCATTTGGTTGA-------------------- | 2.26% | −20 |
| | | GTTCAAACTATATGACTTTATTTGTATATAGAAA | | |
| 2 | CR001142 | | . . . | . . . |
| 1 | CR001158 | CCTGGAAGCCAACGAAAGATATTGAATAATTCAAGAAAaGGTGGTGGCATGGTTTG | 10.94% | 1 |
| | | ATTTGTGTCTTTAAAAGATTATTCT | | |
| 1 | CR001158 | CCTGGAAGCCAACGAAAGATATTGAATAATTCAAG---- | 10.03% | −4 |
| | | GTGGTGGCATGGTTTGATTTGTGTCTTTAAAAGATTATTCT | | |
| 1 | CR001158 | CCTGGAAGCCAACGAAAGATATTGAATAATTCAAGAA- | 3.80% | −1 |
| | | GGTGGTGGCATGGTTTGATTTGTGTCTTTAAAAGATTATTCT | | |
| 1 | CR001158 | CCTGGAAGCCAACGAAAGATATTGAATAATTCAAGA-- | 1.19% | −2 |
| | | GGTGGTGGCATGGTTTGATTTGTGTCTTTAAAAGATTATTCT | | |
| 1 | CR001158 | CCTGGAAGCCAACGAAAGATATTGAATAATTCA----- | 0.78% | −5 |
| | | GGTGGTGGCATGGTTTGATTTGTGTCTTTAAAAGATTATTCT | | |
| 1 | CR001158 | | . . . | . . . |
| 2 | CR001158 | CCTGGAAGCCAACGAAAGATATTGAATAATTCAAGAAAaGGTGGTGGCATGGTTTG | 11.89% | 1 |
| | | ATTTGTGTCTTTAAAAGATTATTCT | | |
| 2 | CR001158 | CCTGGAAGCCAACGAAAGATATTGAATAATTCAAG---- | 9.97% | −4 |
| | | GTGGTGGCATGGTTTGATTTGTGTCTTTAAAAGATTATTCT | | |
| 2 | CR001158 | CCTGGAAGCCAACGAAAGATATTGAATAATTCAAGAA- | 3.45% | −1 |
| | | GGTGGTGGCATGGTTTGATTTGTGTCTTTAAAAGATTATTCT | | |
| 2 | CR001158 | CCTGGAAGCCAACGAAAGATATTGAATAATTCAAGA-- | 0.86% | −2 |
| | | GGTGGTGGCATGGTTTGATTTGTGTCTTTAAAAGATTATTCT | | |
| 2 | CR001158 | CCTGGAAGCCAACGAAAGATATTGAATAATTCAAGAAcaAGGTGGTGGCATGGTTT | 0.49% | 2 |
| | | GATTTGTGTCTTTAAAAGATTATTCT | | |
| 2 | CR001158 | | . . . | . . . |
| 1 | CR001212 | CCTTGGCCTCCCAAAGTGCTGGGTTTACAAGCCTGAGCCA------------- | 11.38% | −13 |
| | | GGATAAGGTCTAAAAGTGGAAAGAATA | | |
| 1 | CR001212 | CCTTGGCCTCCCAAAGTGCTGGGTTTACAAGCCTGAGCCACC- | 3.98% | −1 |
| | | CATCCAGCCAGGATAAGGTCTAAAAGTGGAAAGAATA | | |
| 1 | CR001212 | CCTTGGCCTCCCAAAGTGCTGGGTTTACAAGCCTGAGCCA----- | 3.05% | −5 |
| | | TCCAGCCAGGATAAGGTCTAAAAGTGGAAAGAATA | | |
| 1 | CR001212 | CCTTGGCCTCCCAAAGTGCTGGGTTTACAAGCCTGAGCCACCG- | 2.94% | −1 |
| | | ATCCAGCCAGGATAAGGTCTAAAAGTGGAAAGAATA | | |
| 1 | CR001212 | CCTTGGCCTCCCAAAGTGCTGGGTTTACAAGCCTGAGCCACC------ | 2.82% | −6 |
| | | AGCCAGGATAAGGTCTAAAAGTGGAAAGAATA | | |
| 1 | CR001212 | | . . . | . . . |
| 2 | CR001212 | CCTTGGCCTCCCAAAGTGCTGGGTTTACAAGCCTGAGCCA------------- | 11.42% | −13 |
| | | GGATAAGGTCTAAAAGTGGAAAGAATA | | |
| 2 | CR001212 | CCTTGGCCTCCCAAAGTGCTGGGTTTACAAGCCTGAGCCACC- | 6.41% | −1 |
| | | CATCCAGCCAGGATAAGGTCTAAAAGTGGAAAGAATA | | |
| 2 | CR001212 | CCTTGGCCTCCCAAAGTGCTGGGTTTACAAGCCTGAGCCACCG- | 5.61% | −1 |
| | | ATCCAGCCAGGATAAGGTCTAAAAGTGGAAAGAATA | | |
| 2 | CR001212 | CCTTGGCCTCCCAAAGTGCTGGGTTTACAAGCCTGAGCCACCG-- | 2.85% | −2 |
| | | TCCAGCCAGGATAAGGTCTAAAAGTGGAAAGAATA | | |
| 2 | CR001212 | CCTTGGCCTCCCAAAGTGCTGGGTTTACAAGCCTGAGCCACC------ | 1.96% | −6 |
| | | AGCCAGGATAAGGTCTAAAAGTGGAAAGAATA | | |
| 2 | CR001212 | | . . . | . . . |
| 1 | CR001217 | AAGTGCTGGGTTTACAAGCCTGAGCCACCGCATCCAGCCAGG------ | 17.75% | −6 |
| | | TCTAAAAGTGGAAAGAATAGCATCTACTCTTG | | |
| 1 | CR001217 | AAGTGCTGGGTTTACAAGCCTGAGCCACCGCATCCAGCCAGGATtAAGGTCTAAAA | 4.06% | 1 |
| | | GTGGAAAGAATAGCATCTACTCTTG | | |
| 1 | CR001217 | AAGTGCTGGGTTTACAAGCCTGAGCCACCGCATCCAGCCAGGAaTAAGGTCTAAAA | 2.38% | 1 |
| | | GTGGAAAGAATAGCATCTACTCTTG | | |
| 1 | CR001217 | AAGTGCTGGGTTTACAAGCCTGAGCCACCGCATCCAGCCAGGA- | 1.35% | −1 |
| | | AAGGTCTAAAAGTGGAAAGAATAGCATCTACTCTTG | | |
| 1 | CR001217 | AAGTGCTGGGTTTACAAGCCTGAGCCACCGCATCCAGCCAGGAT----- | 1.10% | −5 |
| | | CTAAAAGTGGAAAGAATAGCATCTACTCTTG | | |
| 1 | CR001217 | | . . . | . . . |
| 2 | CR001217 | AAGTGCTGGGTTTACAAGCCTGAGCCACCGCATCCAGCCAGG------ | 18.91% | −6 |
| | | TCTAAAAGTGGAAAGAATAGCATCTACTCTTG | | |
| 2 | CR001217 | AAGTGCTGGGTTTACAAGCCTGAGCCACCGCATCCAGCCAGGATtAAGGTCTAAAA | 5.59% | 1 |
| | | GTGGAAAGAATAGCATCTACTCTTG | | |
| 2 | CR001217 | AAGTGCTGGGTTTACAAGCCTGAGCCACCGCATCCAGCCAGGAaTAAGGTCTAAAA | 1.42% | 1 |
| | | GTGGAAAGAATAGCATCTACTCTTG | | |
| 2 | CR001217 | AAGTGCTGGGTTTACAAGCCTGAGCCACCGCATCCAGCCAGGA- | 1.38% | −1 |
| | | AAGGTCTAAAAGTGGAAAGAATAGCATCTACTCTTG | | |
| 2 | CR001217 | AAGTGCTGGGTTTACAAGCCTGAGCCACCGCATCCAGCCAGGAT----- | 1.26% | −5 |
| | | CTAAAAGTGGAAAGAATAGCATCTACTCTTG | | |
| 2 | CR001217 | | . . . | . . . |
| 1 | CR001221 | TAGCATCTACTCTTGTTCAGGAAACAATGAGGACCTG---- | 28.78% | −4 |
| | | GGCAGTAAGAGTGGTGATTAATAGATAGGGACAAATTGA | | |
| 1 | CR001221 | TAGCATCTACTCTTGTTCAGGAAACAATGAGGACCT- | 9.51% | −1 |
| | | ACTGGGCAGTAAGAGTGGTGATTAATAGATAGGGACAAATTGA | | |
| 1 | CR001221 | TAGCATCTACTCTTGTTCAGGAAACAATGAGGAC----- | 4.35% | −5 |
| | | TGGGCAGTAAGAGTGGTGATTAATAGATAGGGACAAATTGA | | |
| 1 | CR001221 | TAGCATCTACTCTTGTTCAGGAAACAATGAGG----------- | 1.87% | −11 |
| | | CAGTAAGAGTGGTGATTAATAGATAGGGACAAATTGA | | |
| 1 | CR001221 | TAGCATCTACTCTTGTTCAGGAAACAATG------------ | 1.71% | −12 |
| | | GGCAGTAAGAGTGGTGATTAATAGATAGGGACAAATTGA | | |
| 1 | CR001221 | | . . . | . . . |
| 2 | CR001221 | TAGCATCTACTCTTGTTCAGGAAACAATGAGGACCTG---- | 29.12% | −4 |
| | | GGCAGTAAGAGTGGTGATTAATAGATAGGGACAAATTGA | | |
| 2 | CR001221 | TAGCATCTACTCTTGTTCAGGAAACAATGAGGACCT- | 10.32% | −1 |
| | | ACTGGGCAGTAAGAGTGGTGATTAATAGATAGGGACAAATTGA | | |
| 2 | CR001221 | TAGCATCTACTCTTGTTCAGGAAACAATGAGGAC----- | 4.26% | −5 |
| | | TGGGCAGTAAGAGTGGTGATTAATAGATAGGGACAAATTGA | | |
| 2 | CR001221 | TAGCATCTACTCTTGTTCAGGAAACAATGAGGAC---------- | 1.89% | −10 |
| | | AGTAAGAGTGGTGATTAATAGATAGGGACAAATTGA | | |
| 2 | CR001221 | TAGCATCTACTCTTGTTCAGGAAACAATGAGG----------- | 1.67% | −11 |
| | | CAGTAAGAGTGGTGATTAATAGATAGGGACAAATTGA | | |
| 2 | CR001221 | | . . . | . . . |

[0796] Although in some cases, the relative abundance of the most frequent indels varied from experiment to experiment, the top indels were largely the same across both experiments for any given gRNA. This indicates that for these dgRNAs, the indel pattern created in HSC cells was consistent. As well, these results support the surprising finding from earlier experiments that small indels (e.g., in this case, indels from 1-20 nucleotides) in the HPFH regions targeted by these gRNAs could result in significant upregulation of fetal hemoglobin. An increase in HbF-containing erythrocytes derived from genome edited cells is likely to have therapeutic implications by reduced sickling.

### Example 4.5

[0797] Methods: Methods are as in Sub-Example 4.1, with the Following Exceptions.

[0798] Human CD34⁺ cell culture. Human CD34+ cells were derived from bone marrow (Hemacare Corporation, Cat. No. BM34C-3). CD34+ cells were thawed and expanded in expansion medium for 1 day prior to RNP delivery. After RNP delivery, cells were immediately transferred back into 200 μl expansion medium and allowed to recover overnight. The following day, the cultures were counted and adjusted to 2.0×10⁵ viable cells per ml. Percent recovery was calculated as the viable cell count 1 day after RNP delivery as a percentage of the viable cells electroporated. After an additional 7 days in expansion medium (8 days following RNP delivery), the viable cell count was again determined. Fold proliferation was calculated as the viable cell count after 7 days in expansion medium divided by 2.0×10⁵ cells per ml. All viable cell counts were measured by flow cytometry using AccuCheck Counting Beads (ThermoFisher cat. No. PCB100) with inviable cells discriminated by DAPI (4′,6-Diamidino-2-Phenylindole) staining After an additional 1 day in expansion medium (9 days following RNP delivery), the cell cultures were phenotyped by flow cytometry as described under Cell phenotyping.

[0799] Assembly of Cas9 and guide RNA ribonucleoprotein (RNP) complexes, preparation of HSPC, and electroporation of RNP into HSPC. The HSPC collected by centrifugation were resuspended in P3 Primary Cell Solution (Lonza cat. No. PBP3-00675) at a cell density of 5.4×10⁶/mL. The RNP was mixed with 20 μL of cells by pipetting up and down and incubated at RT for 2 min. The RNP/cell mixture (20 μL) was electroporated using code CM-137 on the 4D-Nucleofector (Lonza). Electroporations were performed in duplicate. The crRNAs used were of the sequence mN*mN*mN*rNrNrNrNrNrNrNrNrNrNrNrNrNrNrNrNrNrGrUrUrUrUrArGrArGrCrUrArU*mG*m C*mU, where r indicates an RNA base, m indicates a base with 2′O-Methyl modification, and * indicates a Phosphorothioate Bond. N's indicate the residues of the indicated targeting domain. The tracr sequence used was SEQ ID NO: 7808.

[0800] Colony forming unit cell assay. The day following RNP delivery, viable cells were counted as described in Human CD34+ cell culture. For the granulocyte/macrophage progenitor colony forming unit (CFU) assay, 227 cells per 1 mL Methocult H4035 methylcellulose medium (StemCell Technologies) was plated in duplicate. 1× antibiotic/antimycotic (Gibco, Cat. #10378-016) was added into the Methocult. The culture dishes were incubated in a humidified incubator at 37° C. Colonies containing at least 50 cells were counted at day 15 post-plating. Colony number per ml of Methocult was divided by 227 and multiplied by 1000 to obtain the CFU frequency per 1000 cells.

[0801] Cell phenotyping. Cells were analyzed for surface marker expression after staining with the following antibody panels. Panel 1: Antibodies specific for CD38 (FITC-conjugate, BD Biosciences #340926, clone HB7), CD133 epitope 1 (PE-conjugate, Miltenyi #130-080-801, clone AC133), CD34 (PerCP-conjugate, BD Biosciences #340666, clone 8G12), CD90 (APC-conjugate, BD Biosciences #598695, clone E10), CD45RA (Pe-Cy7-conjugate, eBioscience #25-0458-42, clone HI100). Panel 2: CD34 (PerCP-conjugate, BD Biosciences #340666, clone 8G12), CD33 (PE-Cy7-conjugate, BD Biosciences #333946, clone P67.6), CD14 (APC-H7-conjugate, BD Biosciences #560270, clone MφP9), CD15 (PE-conjugate, Biolegend #301905, clone HI98). Panel 3: CD34 (PerCP-conjugate, BD Biosciences #340666, clone 8G12), CD41a (APC-H7-conjugate, BD Biosciences #561422, clone HIPS), CD71 (FITC-conjugate, BD Biosciences #555536, clone M-A712), CD19 (PE-conjugate, BD Biosciences #340720, clone SJ25C1), CD56 (APC-conjugate, Biolegend #318310, clone HCD56). Corresponding isotype control antibody panels were used to stain cultures in parallel, except that anti-CD45RA was included instead of its isotype control. Inviable cells were discriminated by DAPI (4′,6-Diamidino-2-Phenylindole) staining Stained samples were analyzed on an LSRFortessa flow cytometer (BD Biosciences) for cell surface protein expression. The results were analyzed using Flowjo, and data were presented as % of the DAPI negative viable cell population.

[0802] Genomic DNA preparation and next generation sequencing (NGS). Genomic DNA was prepared from edited and unedited HSPC at 1 and 8 days post-electroporation using Quick Extract DNA Extraction Solution (Epicentre Cat # QE09050).

### Results:

[0803] Without being bound by theory, it is believed that targeted genetic disruption of the HPFH or BCL11A erythroid enhancer region will relieve repression of γ-globin expression, allowing production of the red blood cells containing elevated HbF protein, (cells expressing fetal hemoglobin are sometimes referred to herein as “F-cells”). The elevated HbF prevents sickling of the red blood cells under deoxygenated conditions and will be therapeutic/curative for the patients of both β-thalassemia and SCD. Autologous hematopoietic stem cell transplantation (HSCT) with ex vivo genome edited HSC from SCD patients was also combined with stem cell expansion enhancing technology, e.g., an aryl hydrocarbon receptor (AHR) inhibitor, e.g., as described in WO2010/059401 (the contents of which are incorporated by reference in their entirety), e.g., Compound 4 to improve ex vivo expansion and increase the dose of gene modified HSC delivered.

[0804] For efficient genome editing via programmable nuclease, Cas9, the successful delivery of guide RNA (gRNA) and Cas9 protein into target cells and tissues is essential. Recent reports demonstrated that Cas9 ribonucleoprotein (RNP) complexes when delivered into target cells by electroporation can accomplish efficient and specific genome editing in several different cell types. Cas9-RNP complexes cleave chromosomal DNA almost immediately after delivery and are degraded rapidly in cells, reducing off-target effects. In contrast, use of plasmid and viral vector systems used to deliver Cas9 results in prolonged expression of the enzyme aggravating off-target effects associated with the system. Additionally, delivery of RNPs into the target cells requires no additional tools which would greatly facilitate translation of genome editing for therapeutic purposes in the clinic. Purified recombinant Cas9 protein and gRNA complexes (RNPs) were delivered into cultured HSPC and an overview experiments used are shown in FIG. 17.

[0805] Recombinant Cas9 protein was purified from Escherichia coli and complexed with synthetic dual gRNAs (dgRNA) that consist of crRNA and tracr to generate ribonucleoprotein (RNP) complexes. The list of gRNAs used in the study are shown in Table 23. The RNP complexes were electroporated into CD34+ HSPC via electroporation as described under materials and methods. The cells were expanded prior to the delivery of RNP complexes. Actively dividing cells may facilitate uptake of RNP complexes delivered by electroporation.

TABLE 23
Relative viable cell recovery, proliferation in CD34+ medium, and
granulocyte/macrophage progenitor colony forming unit (CFU) frequency
for edited and unedited cell cultures in the current study. Percent
recovery, Fold proliferation and CFU frequency were calculated as
described in Materials and Methods. Individual electroporation replicates
are shown. All gRNA molecules were tested in the dgRNA format. The
Tracr sequence was SEQ ID NO: 7808, and the crRNA had the following
format with 2′O-Methyl (m) and Phosphorothioate Bond (*)
modifications indicated: mN*mN*mN*rNrNrNrNrNrNrNrNrNrNrNrNr
NrNrNrNrNrGrUrUrUrUrArGrArGrCrUrArU*mG*m C*mU, where N's
are the residues of the indicated targeting domain

| | | Fold | |
|---|---|---|---|
| Guide RNA targeting | % | proliferation | CFU (per |
| domain ID and replicate | recovery | (7 days) | 1000 cells) |
| CR001030 replicate 1 | 77.7 | 7.1 | 117 |
| CR001030 replicate 2 | 87.9 | 4.8 | 95 |
| CR001028 replicate 1 | 85.3 | 10.6 | 176 |
| CR001028 replicate 2 | 82.1 | 10.9 | 141 |
| CR001095 replicate 1 | 72.5 | 7.3 | 121 |
| CR001095 replicate 2 | 73.3 | 7.3 | 126 |
| CR001212 replicate 1 | 75.6 | 7.7 | 123 |
| CR001212 replicate 2 | 75.5 | 8.2 | 97 |
| CR000312 replicate 1 | 77.7 | 12.2 | 145 |
| CR000312 replicate 2 | 81.0 | 9.0 | 143 |
| g8 replicate 1 | 80.0 | 16.6 | 145 |
| g8 replicate 2 | 84.6 | 17.3 | 145 |
| None/control replicate 1 | 89.8 | 19.3 | 185 |
| None/control replicate 2 | 81.2 | 20.5 | 154 |

[0806] Percent cell recovery at 1 day after electroporation ranged from 72.5% to 89.8% and was similar across conditions, including the unedited but electroporated control (Table 23). The genome edited and unedited HSPC were analyzed for proliferation in CD34+ cell expansion medium. Proliferation ranged from 4.8-fold to 17.3-fold over 7 days for edited cell cultures, and ranged from 19.3 to 20.5-fold for unedited cells (Table 22). Editing by dgRNAs in this study targeting the HPFH or BCL11A erythroid enhancer regions did not alter the composition of cell types in the culture compared to unedited control, as determined by surface marker expression, indicating that targeting these sites does not alter HSPC fate under these conditions (FIG. 26A-B). In contrast, editing with dgRNA targeting g8 in the BCL11A exon resulted in a modest reduction in proliferation but a marked shift in cell composition, specifically a decrease in the percentage of all CD34+ HSPC sub-types as well as of the CD71+ erythroid population and an increase in the percentage of CD14+ monocyte and CD15+ granulocyte populations (Table 23 and FIG. 26A-B). The frequency of granulocyte/macrophage progenitor colony forming units (CFU) was similar across edited cultures, with only a modest CFU reduction in edited cultures (ranging from 95 to 145 CFU per 1000 cells) compared with unedited cultures (154 to 185 CFU per 1000 cells), suggesting that granulocyte/macrophage progenitor function is not grossly altered by targeting these sites (Table 23).

### Example 4.6

[0807] Methods: Methods are as in Example 4, with the Following Exceptions.

[0808] Assembly of Cas9 and guide RNA ribonucleoprotein (RNP) complexes, preparation of HSPC, and electroporation of RNP into HSPC. In some instances, crRNAs containing two different targeting domains were delivered into the same cell culture. In these instances, the total RNP delivered to cells contained 6 μg of Cas9, 3 μg of crRNA and 3 μg of Tracr, as in sub-example 4.1; however, the two crRNAs containing 1.5 μg each were independently complexed Tracr/CAS9 mixtures containing 1.5 μg Tracr and 3 μg Cas9 and only combined when added to the cells. The HSPC collected by centrifugation were resuspended in P3 Primary Cell Solution (Lonza cat. No. PBP3-00675) at a cell density of 2.5×10⁶/mL. The RNP was mixed with 20 μL of cells by pipetting up and down and incubated at RT for 2 min. The RNP/cell mixture (20 μL) was electroporated using code CM-137 on the 4D-Nucleofector (Lonza). Electroporations were performed in duplicate. The dgRNA format used a tracr having SEQ ID NO: 7808, and a crRNA of the sequence mN*mN*mN*rNrNrNrNrNrNrNrNrNrNrNrNrNrNrNrNrNrGrUrUrUrUrArGrArGrCrUrArU*mG*m C*mU, where r indicates an RNA base, m indicates a base with 20-Methyl modification, and * indicates a Phosphorothioate Bond, and N's indicate the residues of the indicated targeting domain.

[0809] In vitro erythropoiesis and FACS analysis for HbF containing erythroid cells. The cell culture was diluted in fresh medium after 3 days.

[0810] Genomic DNA preparation and next generation sequencing (NGS). Genomic DNA was prepared from edited and unedited HSPC at 3 days post-electroporation using Quick Extract DNA Extraction Solution (Epicentre Cat # QE09050).

### Results:

[0811] Without being bound by theory, it is believed that targeted genetic disruption of the HPFH or BCL11A erythroid enhancer region will relieve repression of γ-globin expression, allowing production of the red blood cells containing elevated HbF protein, (cells expressing fetal hemoglobin are sometimes referred to herein as “F-cells”). The elevated HbF prevents sickling of the red blood cells under deoxygenated conditions and will be therapeutic/curative for the patients of both β-thalassemia and SCD. Autologous hematopoietic stem cell transplantation (HSCT) with ex vivo genome edited HSC from SCD patients was also combined with stem cell expansion enhancing technology, e.g., an aryl hydrocarbon receptor (AHR) inhibitor, e.g., as described in WO2010/059401 (the contents of which are incorporated by reference in their entirety), e.g., Compound 4 to improve ex vivo expansion and increase the dose of gene modified HSC delivered.

[0812] For efficient genome editing via programmable nuclease, Cas9, the successful delivery of guide RNA (gRNA) and Cas9 protein into target cells and tissues is essential. Recent reports demonstrated that Cas9 ribonucleoprotein (RNP) complexes when delivered into target cells by electroporation can accomplish efficient and specific genome editing in several different cell types. Cas9-RNP complexes cleave chromosomal DNA almost immediately after delivery and are degraded rapidly in cells, reducing off-target effects. In contrast, use of plasmid and viral vector systems used to deliver Cas9 results in prolonged expression of the enzyme aggravating off-target effects associated with the system. Additionally, delivery of RNPs into the target cells requires no additional tools which would greatly facilitate translation of genome editing for therapeutic purposes in the clinic. Purified recombinant Cas9 protein and gRNA complexes (RNPs) were delivered into cultured HSPC and an overview experiments used are shown in FIG. 17.

[0813] Recombinant Cas9 protein was purified from Escherichia coli and complexed with synthetic dual gRNAs (dgRNA) that consist of crRNA and tracr to generate ribonucleoprotein (RNP) complexes. The list of gRNAs used in the study are shown in Table 24. The RNP complexes were electroporated into CD34+ HSPC via electroporation as described under materials and methods. The cells were expanded prior to the delivery of RNP complexes. Actively dividing cells may facilitate uptake of RNP complexes delivered by electroporation.

TABLE 24
HbF induction by simultaneous targeting of both the BCL11A erythroid
enhancer and HPFH regions. All gRNA molecules were tested in the
dgRNA format in duplicate. The tracr used has the sequence of SEQ
ID NO: 7808, and the crRNA had the following format with 2′O-Methyl
(m) and Phosphorothioate Bond (*) modifications indicated:
mN*mN*mN*rNrNrNrNrNrNrNrNrNrNrNrNrNrNrNrNrNrGrUrUrUrUr
ArGrArGrCrUrArU*mG*mC*mU, where N's are the residues of
the indicated targeting domain.

| | Guide | | % edited at | % edited at |
|---|---|---|---|---|
| | RNA | % HbF+ | targeting | targeting |
| Guide RNA | targeting | (F cells), | site #1, | site #2, |
| targeting domain | domain | average of | average of | average of |
| ID #1 | ID #2 | replicates | replicates | replicates |
| CR000312 | n/a | 41.3 | 91.3 | n/a |
| CR001128_EH15 | n/a | 43.7 | 77.5 | n/a |
| n/a | CR001030 | 58.0 | n/a | 85.6 |
| n/a | CR001221 | 48.6 | n/a | 92.1 |
| CR000312 | CR001030 | 66.8 | 58.3 | 81.2 |
| CR000312 | CR001221 | 60.6 | 64.2 | 85.0 |
| CR001128_EH15 | CR001030 | 69.1 | 49.8 | 82.9 |
| CR001128_EH15 | CR001221 | 62.7 | 58.5 | 84.8 |
| g8 | n/a | 64.7 | 94.6 | n/a |
| None/control | n/a | 23.8 | n/a | n/a |

[0814] The genome edited and unedited HSPC were analyzed by flow cytometry for expression levels of fetal globin and two erythroid cell surface markers, transferrin receptor (CD71) and glycophorin A (CD235a) using antibodies conjugated to fluorescent dyes. The live cells were identified and gated by exclusion of Live Dead Violet. HPFH region or BCL11A erythroid enhancer targeting resulted in increased percentage of erythroid cells containing HbF compared to mock electroporated cells (Table 24). Induction of HbF positive cells by dgRNA including the targeting domain of g8 targeting exon 2 of BCL11A was also observed in parallel. When the HPFH region and BCL11A erythroid enhancer were targeted simultaneously in the same cell population, the percentage of HbF containing cells was increased beyond that of targeting either region independently (Table 24). Thus, an increase in HbF-containing erythrocytes derived from edited cells can be achieved by targeting either the HPFH region or BCL erythroid enhancer, as well as to a greater extent by simultaneous targeting of both regions.

[0815] Genomic PCR products of both regions were independently subjected to next generation sequencing (NGS) to determine the percentage of edited alleles in the cell population. Genome editing was observed in cell cultures electroporated with RNPs containing Cas9, crRNA of the given targeting domain and Tracr (Table 24), but not in control cells with no targeting domain delivered (RNPs containing only Cas9 and Tracr). When RNPs targeting two sites were delivered into the same cell population, editing at both sites was observed (Table 24). In some instances, the percent edited cells at a given site was modestly reduced when two RNPs were delivered compared with when only one RNP was delivered (Table 24), possibly due to the lower RNP concentration targeting a given site in the former instance. Higher editing percentages and potentially higher percentages of HbF containing cells may be achieved by increasing the each individual RNP concentration when two RNPs are delivered simultaneously. An increase in HbF-containing erythrocytes derived from genome edited cells is likely to have therapeutic implications by reduced sickling.

### Example 4.7

[0816] Methods: Methods are as in Example 4, with the Following Exceptions.

[0817] Human CD34+ cell culture. Human CD34+ cells were derived from bone marrow (Lonza, Cat. No. 2M-101D). CD34+ cells were thawed and expanded for 2 days in expansion medium prior to RNP delivery.

[0818] Assembly of Cas9 and guide RNA ribonucleoprotein (RNP) complexes, preparation of HSPC, and electroporation of RNP into HSPC. For formation of RNP using single guide RNAs (sgRNAs), 6 μg of sgRNA was added to 6 μg of CAS9 protein (in 0.8 to 1 μL) and 0.5 μL of 5×CCE buffer (20 mM HEPES, 100 mM KCL, 5 mM MgCL2, 5% Glycerol and freshly added 1 mM DTT) in a total volume of 5 μL and incubated for 5 min at 37° C. The HSPC were collected by centrifugation were resuspended in P3 Primary Cell Solution (Lonza cat. No. PBP3-00675) at a cell density of 6.4×106/mL. The RNP was mixed with 20 μL of cells by pipetting up and down and incubated at RT for 2 min. The RNP/cell mixture (20 μL) was electroporated using code CM-137 on the 4D-Nucleofector (Lonza). Electroporations were performed in duplicate. For dgRNA, dgRNA-PS and dgRNA-OMePS the Tracr was SEQ ID NO: 6660, with the exception of g8 which was used with Tracr SEQ ID NO: 7808. The formats for all gRNAs used in this experiment are shown in Table 36, with the exception of the dgRNA g8 OMePS, which included a crRNA having the sequence mC*mA*mC*AAACGGAAACAAUGCAAGUUUUAGAGCUAU*mG*mC*mU. and a tracr having the sequence of SEQ ID NO: 7808.

[0819] In vitro erythropoiesis and FACS analysis for HbF containing erythroid cells. After RNP delivery, cells were maintained as per Protocol 1 or Protocol 2. For Protocol 1, the cells were immediately transferred into pre-warmed medium consisting of EDM and supplements. During days 0-7 of culture, EDM was further supplemented with 1 μM hydrocortisone (Sigma H8672), 100 ng/mL human SCF (Life Technologies, Cat. #PHC2113), and 5 ng/mL human IL-3 (Peprotech #10779-598). During days 7-11 of culture, EDM was supplemented with 100 ng/mL of human SCF only. During days 11-21 of culture, EDM had no additional supplements. Cell cultures were adjusted to 4.0×10⁴ cells per ml on day 7. On days 11, 14 and 19, the media was replenished. For Protocol 2, cells were immediately transferred back into 200 al expansion medium and allowed to expand for an additional 2 days. The cultures were counted at 2 days after RNP delivery. The cells were then pelleted and resuspended in pre-warmed medium consisting of EDM and supplements. During days 0-7 of EDM culture, EDM was further supplemented with 1 μM hydrocortisone (Sigma H8672), 100 ng/mL human SCF (Life Technologies, Cat. #PHC2113), and 5 ng/mL human IL-3 (Peprotech #10779-598). During days 7-11 of culture, EDM was supplemented with 100 ng/mL of human SCF only. During days 11-21 of culture, EDM had no additional supplements. Cell cultures were initiated at 4.0×10⁴ cells per ml on day 0, diluted 4-fold with fresh medium on day 4, and adjusted to 2.0×10⁵ cells per ml on day 7. On days 11, 14 and 19, the media was replenished. Viable cells were counted at 7, 18 and 21 days in EDM culture. All viable cell counts were determined by flow cytometry using AccuCheck Counting Beads (ThermoFisher cat. No. PCB100) with inviable cells discriminated by DAPI (4′,6-Diamidino-2-Phenylindole) staining. For both protocols, on days 7, 14 and 21 of the erythroid differentiation culture, the cells were analyzed by intracellular staining for HbF expression. On days 14 and 21 intracellular staining for HbF expression did not include anti-CD71 and anti-CD235a antibodies, and % of HbF positive cells (F-cells) in the entire viable cell population was reported. LIVE/DEAD® Fixable Near-IR Dead Cell Stain (ThermoFisher L34975) was used as the viability dye.

[0820] Genomic DNA preparation and next generation sequencing (NGS). Genomic DNA was prepared at 2 and 6 days post-electroporation from edited and unedited HSPC cultured by Protocol 2 using Quick Extract DNA Extraction Solution (Epicentre Cat # QE09050).

### Results:

[0821] Without being bound by theory, it is believed that targeted genetic disruption of the HPFH region will relieve repression of γ-globin expression, allowing production of the red blood cells containing elevated HbF protein, (cells expressing fetal hemoglobin are sometimes referred to herein as “F-cells”). The elevated HbF prevents sickling of the red blood cells under deoxygenated conditions and will be therapeutic/curative for the patients of both β-thalassemia and SCD. Autologous hematopoietic stem cell transplantation (HSCT) with ex vivo genome edited HSC from SCD patients was also combined with stem cell expansion enhancing technology, e.g., an aryl hydrocarbon receptor (AHR) inhibitor, e.g., as described in WO2010/059401 (the contents of which are incorporated by reference in their entirety), e.g., Compound 4 to improve ex vivo expansion and increase the dose of gene modified HSC delivered.

[0822] For efficient genome editing via programmable nuclease, Cas9, the successful delivery of guide RNA (gRNA) and Cas9 protein into target cells and tissues is essential. Recent reports demonstrated that Cas9 ribonucleoprotein (RNP) complexes when delivered into target cells by electroporation can accomplish efficient and specific genome editing in several different cell types. Cas9-RNP complexes cleave chromosomal DNA almost immediately after delivery and are degraded rapidly in cells, reducing off-target effects. In contrast, use of plasmid and viral vector systems used to deliver Cas9 results in prolonged expression of the enzyme aggravating off-target effects associated with the system. Additionally, delivery of RNPs into the target cells requires no additional tools which would greatly facilitate translation of genome editing for therapeutic purposes in the clinic. Purified recombinant Cas9 protein and gRNA complexes (RNPs) were delivered into cultured HSPC and an overview experiments used are shown in FIG. 17.

[0823] Recombinant Cas9 protein was purified from Escherichia coli and complexed with synthetic single gRNAs (sgRNA) or dual gRNAs (dgRNA) that consist of crRNA and tracr to generate ribonucleoprotein (RNP) complexes. The formats of gRNAs used in the study are shown in Table 36. The RNP complexes were electroporated into CD34+ HSPC via electroporation as described under materials and methods. The cells were expanded prior to the delivery of RNP complexes and, in some cases (Protocol 2) also after electroporation. Actively dividing cells may facilitate uptake of RNP complexes delivered by electroporation.

[0824] Genomic PCR products of the HPFH region were subjected to next generation sequencing (NGS) to determine the percentage of edited alleles in the cell population. Genome editing at the HFPH locus was observed in cell cultures electroporated with RNPs containing Cas9, crRNA of the given targeting domain and Tracr (FIG. 43), but not in control cells with no targeting domain delivered (RNPs containing only Cas9 and Tracr). In some instances, editing was greater at a given target site using modified sgRNAs relative to the other gRNA formats (FIG. 43). Finally, the indel pattern as well as frequency of each indel was assessed for each gRNA by NGS. Indel pattern across multiple replicates using the same gRNA/Cas9 were similar Representative most frequently occurring indels at each target site are shown in Table 37.

TABLE 36
gRNA sequences used in the experiments described in
this sub-example. N indicates the residues of the indicated
targeting domain; mN indicates a 2′-OMe-modified
nucleic acid; *indicates a phosphorothioate modification.

| Label | Format | Sequence |
|---|---|---|
| CRxxxxxx | sgRNA | NNNNNNNNNNNNNNNNNNNNGUUUUAGAGCUAGAAAUAGCAAGU |
| sg | | UAAAAUAAGGCUAGUCCGUUAUCAACUUGAAAAAGUGGCACCGA |
| | | GUCGGUGCUUUU |
| CRxxxxxx | sgRNA | mN*mN*mN*NNNNNNNNNNNNNNNNNGUUUUAGAGCUAGAAAUA |
| OMePS sg | | GCAAGUUAAAAUAAGGCUAGUCCGUUAUCAACUUGAAAAAGUGG |
| or | | CACCGAGUCGGUGCmU*mU*mU*U |
| CRxxxxxx | | |
| sg OMePS | | |
| CRxxxxxx | sgRNA | N*N*N*NNNNNNNNNNNNNNNNNGUUUUAGAGCUAGAAAUAGCAA |
| PS sg or | | GUUAAAAUAAGGCUAGUCCGUUAUCAACUUGAAAAAGUGGCACC |
| CRxxxxxx | | GAGUCGGUGCU*U*U*U |
| sg PS | | |
| CRxxxxxx | dgRNA | NNNNNNNNNNNNNNNNNNNNGUUUUAGAGCUAUGCUGUUUUG |
| | | and |
| | | AACAGCAUAGCAAGUUAAAAUAAGGCUAGUCCGUUAUCAACUUG |
| | | AAAAAGUGGCACCGAGUCGGUGCUUUUUUU (SEQ ID NO: 6660) |
| CRxxxxxx | dgRNA | mN*mN*mN*NNNNNNNNNNNNNNNNNGUUUUAGAGCUAUGCUGU |
| OMePS | | U*mU*mU*mG |
| | | and |
| | | AACAGCAUAGCAAGUUAAAAUAAGGCUAGUCCGUUAUCAACUUG |
| | | AAAAAGUGGCACCGAGUCGGUGCUUUUUUU (SEQ ID NO: 6660) |
| CRxxxxxx | dgRNA | N*N*N*NNNNNNNNNNNNNNNNNGUUUUAGAGCUAUGCUGUU*U* |
| PS | | U*G |
| | | and |
| | | AACAGCAUAGCAAGUUAAAAUAAGGCUAGUCCGUUAUCAACUUG |
| | | AAAAAGUGGCACCGAGUCGGUGCUUUUUUU (SEQ ID NO: 6660) |

TABLE 37
Top indels observed for each gRNA (targeting domain and format) from NGS
sequencing at Day 6 post-RNP introduction. gRNA sequences are as indicated
in Table 36. Capital letters are the naturally occurring nucleotides at and near
the target sequence. Deletions relative to the unmodified target sequence
are shown as “-”; insertions are shown as lowercase letters.

| gRNA | | | |
|---|---|---|---|
| targeting | | % of | |
| domain ID | | all | Indel |
| and format | Variant Read (Genomic Sequence) | reads | length |
| g8 dgRNA | ACATTCTTATTTTTATCGAGCACAAACGGAAACAATG----- | 47.57% | −5 |
| OMePS | GCAGCCTCTGCTTAGAAAAAGCTGTGGATAAGCCACCT | | |
| g8 dgRNA | ACATTCTTATTTTTATCGAGCACAAACGGAAACAATG- | 13.92% | −1 |
| OMePS | AATGGCAGCCTCTGCTTAGAAAAAGCTGTGGATAAGCCA | | |
| | CCT | | |
| g8 dgRNA | ACATTCTTATTTTTATCGAGCACAAACGGAAACAATG-- | 2.89% | −2 |
| OMePS | ATGGCAGCCTCTGCTTAGAAAAAGCTGTGGATAAGCCAC | | |
| | CT | | |
| g8 dgRNA | ACATTCTTATTTTTATCGAGCACAAACGGAAACAATGCA-- | 2.01% | −6 |
| OMePS | ----GCCTCTGCTTAGAAAAAGCTGTGGATAAGCCACCT | | |
| g8 dgRNA | ACATTCTTATTTTTATCGAGCACAAACGGAAACAAT- | 1.65% | −1 |
| OMePS | CAATGGCAGCCTCTGCTTAGAAAAAGCTGTGGATAAGCC | | |
| | ACCT | | |
| g8 dgRNA | ACATTCTTATTTTTATCGAGCACAAACGGAAACAAaTGCA | 1.53% | 1 |
| OMePS | ATGGCAGCCTCTGCTTAGAAAAAGCTGTGGATAAGCCAC | | |
| | CT | | |
| CR001028 | TTCTGTCATGTGTGTCTTGACTCAGAAACCCTGTTCTCC---- | 14.45% | −13 |
| | ---------CCACCGCATCTCTTTCAGCAGTTGTTTC | | |
| CR001028 | TTCTGTCATGTGTGTCTTGACTCAGAAACCCTGTTCTCCTC | 7.55% | 0 |
| | TgCATATCTCCCCACCGCATCTCTTTCAGCAGTTGTTTC | | |
| CR001028 | TTCTGTCATGTGTGTCTTGACTCAGAAACCCTGTTCTCCTC | 7.49% | −1 |
| | TA-ATATCTCCCCACCGCATCTCTTTCAGCAGTTGTTTC | | |
| CR001028 | TTCTGTCATGTGTGTCTTGACTCAGAAACCCTGTTCTCCTC | 4.94% | −13 |
| | -------------ACCGCATCTCTTTCAGCAGTTGTTTC | | |
| CR001028 | TTCTGTCATGTGTGTCTTGACTCAGAAACCCTGTTCTCCTC | 4.33% | −4 |
| | TA----TCTCCCCACCGCATCTCTTTCAGCAGTTGTTTC | | |
| CR001028 | TTCTGTCATGTGTGTCTTGACTCAGAAACCCTGTTCTCCTC | 2.83% | −2 |
| | TA--TATCTCCCCACCGCATCTCTTTCAGCAGTTGTTTC | | |
| CR001028 | TTCTGTCATGTGTGTCTTGACTCAGAAACCCTGTTCTCC---- | 19.29% | −13 |
| OMePS sg | ---------CCACCGCATCTCTTTCAGCAGTTGTTTC | | |
| CR001028 | TTCTGTCATGTGTGTCTTGACTCAGAAACCCTGTTCTCCTC | 7.11% | 0 |
| OMePS sg | TgCATATCTCCCCACCGCATCTCTTTCAGCAGTTGTTTC | | |
| CR001028 | TTCTGTCATGTGTGTCTTGACTCAGAAACCCTGTTCTCCTC | 6.26% | −13 |
| OMePS sg | -------------ACCGCATCTCTTTCAGCAGTTGTTTC | | |
| CR001028 | TTCTGTCATGTGTGTCTTGACTCAGAAACCCTGTTCTCCTC | 6.19% | −1 |
| OMePS sg | TA-ATATCTCCCCACCGCATCTCTTTCAGCAGTTGTTTC | | |
| CR001028 | TTCTGTCATGTGTGTCTTGACTCAGAAACCCTGTTCTCCTC | 5.44% | −4 |
| OMePS sg | TA----TCTCCCCACCGCATCTCTTTCAGCAGTTGTTTC | | |
| CR001028 | TTCTGTCATGTGTGTCTTGACTCAGAAACCCTGTTCTCCTC | 2.89% | −2 |
| OMePS sg | TA--TATCTCCCCACCGCATCTCTTTCAGCAGTTGTTTC | | |
| CR001028 | TTCTGTCATGTGTGTCTTGACTCAGAAACCCTGTTCTCC---- | 15.91% | −13 |
| OMePS | ---------CCACCGCATCTCTTTCAGCAGTTGTTTC | | |
| CR001028 | TTCTGTCATGTGTGTCTTGACTCAGAAACCCTGTTCTCCTC | 8.91% | 0 |
| OMePS | TgCATATCTCCCCACCGCATCTCTTTCAGCAGTTGTTTC | | |
| CR001028 | TTCTGTCATGTGTGTCTTGACTCAGAAACCCTGTTCTCCTC | 4.80% | −4 |
| OMePS | TA----TCTCCCCACCGCATCTCTTTCAGCAGTTGTTTC | | |
| CR001028 | TTCTGTCATGTGTGTCTTGACTCAGAAACCCTGTTCTCCTC | 4.59% | −13 |
| OMePS | -------------ACCGCATCTCTTTCAGCAGTTGTTTC | | |
| CR001028 | TTCTGTCATGTGTGTCTTGACTCAGAAACCCTGTTCTCCTC | 2.92% | −1 |
| OMePS | TA-ATATCTCCCCACCGCATCTCTTTCAGCAGTTGTTTC | | |
| CR001028 | TTCTGTCATGTGTGTCTTGACTCAGAAACCtTGTTCTCCTC | 1.75% | 0 |
| OMePS | TACATATCTCCCCACCGCATCTCTTTCAGCAGTTGTTTC | | |
| CR001028 | TTCTGTCATGTGTGTCTTGACTCAGAAACCCTGTTCTCC---- | 13.02% | −13 |
| PS | ---------CCACCGCATCTCTTTCAGCAGTTGTTTC | | |
| CR001028 | TTCTGTCATGTGTGTCTTGACTCAGAAACCCTGTTCTCCTC | 8.11% | 0 |
| PS | TgCATATCTCCCCACCGCATCTCTTTCAGCAGTTGTTTC | | |
| CR001028 | TTCTGTCATGTGTGTCTTGACTCAGAAACCCTGTTCTCCTC | 6.08% | −1 |
| PS | TA-ATATCTCCCCACCGCATCTCTTTCAGCAGTTGTTTC | | |
| CR001028 | TTCTGTCATGTGTGTCTTGACTCAGAAACCCTGTTCTCCTC | 4.43% | −13 |
| PS | -------------ACCGCATCTCTTTCAGCAGTTGTTTC | | |
| CR001028 | TTCTGTCATGTGTGTCTTGACTCAGAAACCCTGTTCTCCTC | 3.86% | −4 |
| PS | TA----TCTCCCCACCGCATCTCTTTCAGCAGTTGTTTC | | |
| CR001028 | TTCTGTCATGTGTGTCTTGACTCAGAAACCCTGTTCTCCTC | 2.96% | −2 |
| PS | TA--TATCTCCCCACCGCATCTCTTTCAGCAGTTGTTTC | | |
| CR001028 | TTCTGTCATGTGTGTCTTGACTCAGAAACCCTGTTCTCC---- | 17.48% | −13 |
| PS sg | ---------CCACCGCATCTCTTTCAGCAGTTGTTTC | | |
| CR001028 | TTCTGTCATGTGTGTCTTGACTCAGAAACCCTGTTCTCCTC | 7.01% | −13 |
| PS sg | -------------ACCGCATCTCTTTCAGCAGTTGTTTC | | |
| CR001028 | TTCTGTCATGTGTGTCTTGACTCAGAAACCCTGTTCTCCTC | 6.84% | 0 |
| PS sg | TgCATATCTCCCCACCGCATCTCTTTCAGCAGTTGTTTC | | |
| CR001028 | TTCTGTCATGTGTGTCTTGACTCAGAAACCCTGTTCTCCTC | 6.05% | −4 |
| PS sg | TA----TCTCCCCACCGCATCTCTTTCAGCAGTTGTTTC | | |
| CR001028 | TTCTGTCATGTGTGTCTTGACTCAGAAACCCTGTTCTCCTC | 4.59% | −2 |
| PS sg | TA--TATCTCCCCACCGCATCTCTTTCAGCAGTTGTTTC | | |
| CR001028 | TTCTGTCATGTGTGTCTTGACTCAGAAACCCTGTTCTCCTC | 3.53% | −1 |
| PS sg | TA-ATATCTCCCCACCGCATCTCTTTCAGCAGTTGTTTC | | |
| CR001028 | TTCTGTCATGTGTGTCTTGACTCAGAAACCCTGTTCTCC---- | 10.58% | −13 |
| sg | ---------CCACCGCATCTCTTTCAGCAGTTGTTTC | | |
| CR001028 | TTCTGTCATGTGTGTCTTGACTCAGAAACCCTGTTCTCCTC | 9.11% | 0 |
| sg | TgCATATCTCCCCACCGCATCTCTTTCAGCAGTTGTTTC | | |
| CR001028 | TTCTGTCATGTGTGTCTTGACTCAGAAACCCTGTTCTCCTC | 6.47% | −1 |
| sg | TA-ATATCTCCCCACCGCATCTCTTTCAGCAGTTGTTTC | | |
| CR001028 | TTCTGTCATGTGTGTCTTGACTCAGAAACCCTGTTCTCCTC | 4.78% | −2 |
| sg | TA--TATCTCCCCACCGCATCTCTTTCAGCAGTTGTTTC | | |
| CR001028 | TTCTGTCATGTGTGTCTTGACTCAGAAACCCTGTTCTCCTC | 4.06% | −13 |
| sg | -------------ACCGCATCTCTTTCAGCAGTTGTTTC | | |
| CR001028 | TTCTGTCATGTGTGTCTTGACTCAGAAACCCTGTTCTCCTC | 3.41% | −4 |
| sg | TA----TCTCCCCACCGCATCTCTTTCAGCAGTTGTTTC | | |
| CR001030 | TCTTGACTCAGAAACCCTGTTCTCCTCTACATATCTC-------- | 8.30% | −13 |
| | ------TTTCAGCAGTTGTTTCTAAAAATATCCTCC | | |
| CR001030 | TCTTGACTCAGAAACCCTGTTCTCCTCTgCATATCTCCCCA | 4.39% | 0 |
| | CCGCATCTCTTTCAGCAGTTGTTTCTAAAAATATCCTCC | | |
| CR001030 | TCTTGACTCAGAAACCCTGTTCTCCTCTACATATCTCCCC | 2.61% | −5 |
| | A-----TCTCTTTCAGCAGTTGTTTCTAAAAATATCCTCC | | |
| CR001030 | TCTTGACTCAGAAACCCTGTTCTCCTCTACATATCTCCCC | 2.18% | −1 |
| | ACC-CATCTCTTTCAGCAGTTGTTTCTAAAAATATCCTCC | | |
| CR001030 | TCTTGACTCAGAAACCtTGTTCTCCTCTACATATCTCCCCA | 2.12% | 0 |
| | CCGCATCTCTTTCAGCAGTTGTTTCTAAAAATATCCTCC | | |
| CR001030 | TCTTGACTCAGAAACCCTGTTCTCCTCTACATATCTCCCC | 2.10% | −2 |
| | ACC--ATCTCTTTCAGCAGTTGTTTCTAAAAATATCCTCC | | |
| CR001030 | TCTTGACTCAGAAACCCTGTTCTCCTCTACATATCTC-------- | 10.40% | −13 |
| IDT | -----TTTCAGCAGTTGTTTCTAAAAATATCCTCC | | |
| CR001030 | TCTTGACTCAGAAACCCTGTTCTCCTCTACATATCTCCCC | 4.56% | 1 |
| IDT | ACCGgCATCTCTTTCAGCAGTTGTTTCTAAAAATATCCTCC | | |
| CR001030 | TCTTGACTCAGAAACCCTGTTCTCCTCTACATATCTCCCC | 3.83% | −1 |
| IDT | AC-GCATCTCTTTCAGCAGTTGTTTCTAAAAATATCCTCC | | |
| CR001030 | TCTTGACTCAGAAACCCTGTTCTCCTCTACATATCTCCCC | 3.68% | −2 |
| IDT | ACC--ATCTCTTTCAGCAGTTGTTTCTAAAAATATCCTCC | | |
| CR001030 | TCTTGACTCAGAAACCCTGTTCTCCTCTACATATCTCCCC | 2.87% | −5 |
| IDT | A-----TCTCTTTCAGCAGTTGTTTCTAAAAATATCCTCC | | |
| CR001030 | TCTTGACTCAGAAACCCTGTTCTCCTCTACATATCT---------- | 2.54% | −15 |
| IDT | -----TTCAGCAGTTGTTTCTAAAAATATCCTCC | | |
| CR001030 | TCTTGACTCAGAAACCCTGTTCTCCTCTACATATCTC-------- | 9.90% | −13 |
| | -----TTTCAGCAGTTGTTTCTAAAAATATCCTCC | | |
| CR001030 | TCTTGACTCAGAAACCCTGTTCTCCTCTACATATCTCCCC | 4.63% | 1 |
| | ACCGgCATCTCTTTCAGCAGTTGTTTCTAAAAATATCCTCC | | |
| CR001030 | TCTTGACTCAGAAACCCTGTTCTCCTCTACATATCTCCCC | 3.71% | −1 |
| | ACC-CATCTCTTTCAGCAGTTGTTTCTAAAAATATCCTCC | | |
| CR001030 | TCTTGACTCAGAAACCCTGTTCTCCTCTACATATCTCCCC | 2.39% | −2 |
| | ACC--ATCTCTTTCAGCAGTTGTTTCTAAAAATATCCTCC | | |
| CR001030 | TCTTGACTCAGAAACCCTGTTCTCCTCTgCATATCTCCCCA | 2.03% | 0 |
| | CCGCATCTCTTTCAGCAGTTGTTTCTAAAAATATCCTCC | | |
| CR001030 | TCTTGACTCAGAAACCCTGTTCTCCTCTACATATCTCCCC | 1.95% | −5 |
| | A-----TCTCTTTCAGCAGTTGTTTCTAAAAATATCCTCC | | |
| CR001030 | TCTTGACTCAGAAACCCTGTTCTCCTCTACATATCTC-------- | 19.91% | −13 |
| OMePS sg | -----TTTCAGCAGTTGTTTCTAAAAATATCCTCC | | |
| CR001030 | TCTTGACTCAGAAACCCTGTTCTCCTCTACATATCTCCCC | 5.76% | −1 |
| OMePS sg | ACC-CATCTCTTTCAGCAGTTGTTTCTAAAAATATCCTCC | | |
| CR001030 | TCTTGACTCAGAAACCCTGTTCTCCTCTACATATCTCCCC | 3.09% | 1 |
| OMePS sg | ACCGgCATCTCTTTCAGCAGTTGTTTCTAAAAATATCCTCC | | |
| CR001030 | TCTTGACTCAGAAACCCTGTTCTCCTCTACATATCTCCCC | 3.03% | −4 |
| OMePS sg | ACCG----TCTTTCAGCAGTTGTTTCTAAAAATATCCTCC | | |
| CR001030 | TCTTGACTCAGAAACCCTGTTCTCCTCTACATATCTCCCC | 2.98% | −6 |
| OMePS sg | AC------TCTTTCAGCAGTTGTTTCTAAAAATATCCTCC | | |
| CR001030 | TCTTGACTCAGAAACCCTGTTCTCCTCTgCATATCT---------- | 2.81% | −15 |
| OMePS sg | -----TTCAGCAGTTGTTTCTAAAAATATCCTCC | | |
| CR001030 | TCTTGACTCAGAAACCCTGTTCTCCTCTACATATCTC-------- | 8.52% | −13 |
| OMePS | -----TTTCAGCAGTTGTTTCTAAAAATATCCTCC | | |
| CR001030 | TCTTGACTCAGAAACCCTGTTCTCCTCTgCATATCTCCCCA | 5.21% | 0 |
| OMePS | CCGCATCTCTTTCAGCAGTTGTTTCTAAAAATATCCTCC | | |
| CR001030 | TCTTGACTCAGAAACCCTGTTCTCCTCTACATATCTCCCC | 2.63% | 1 |
| OMePS | ACCGgCATCTCTTTCAGCAGTTGTTTCTAAAAATATCCTCC | | |
| CR001030 | TCTTGACTCAGAAACCCTGTTCTCCTCTACATATCTCCCC | 2.25% | −1 |
| OMePS | AC-GCATCTCTTTCAGCAGTTGTTTCTAAAAATATCCTCC | | |
| CR001030 | TCTTGACTCAGAAACCCTGTTCTCCTCTACATATCTCCCC | 1.81% | −5 |
| OMePS | A-----TCTCTTTCAGCAGTTGTTTCTAAAAATATCCTCC | | |
| CR001030 | TCTTGACTCAGAAACCCTGTTCTCCTCTACATATCTCCCC | 1.77% | −1 |
| OMePS | ACC-CATCTCTTTCAGCAGTTGTTTCTAAAAATATCCTCC | | |
| CR001030 | TCTTGACTCAGAAACCCTGTTCTCCTCTACATATCTC-------- | 5.99% | −13 |
| PS | -----TTTCAGCAGTTGTTTCTAAAAATATCCTCC | | |
| CR001030 | TCTTGACTCAGAAACCCTGTTCTCCTCTgCATATCTCCCCA | 4.09% | 0 |
| PS | CCGCATCTCTTTCAGCAGTTGTTTCTAAAAATATCCTCC | | |
| CR001030 | TCTTGACTCAGAAACCCTGTTCTCCTCTACATATCTCCCC | 3.90% | 1 |
| PS | ACCGgCATCTCTTTCAGCAGTTGTTTCTAAAAATATCCTCC | | |
| CR001030 | TCTTGACTCAGAAACCCTGTTCTCCTCTACATATCTCCCC | 3.59% | −5 |
| PS | A-----TCTCTTTCAGCAGTTGTTTCTAAAAATATCCTCC | | |
| CR001030 | TCTTGACTCAGAAACCCTGTTCTCCTCTACATATCTCCCC | 2.86% | −1 |
| PS | ACC-CATCTCTTTCAGCAGTTGTTTCTAAAAATATCCTCC | | |
| CR001030 | TCTTGACTCAGAAACCCTGTTCTCCTCTACATATCTCCCC | 2.39% | −2 |
| PS | ACC--ATCTCTTTCAGCAGTTGTTTCTAAAAATATCCTCC | | |
| CR001030 | TCTTGACTCAGAAACCCTGTTCTCCTCTACATATCTC-------- | 11.86% | −13 |
| PS sg | -----TTTCAGCAGTTGTTTCTAAAAATATCCTCC | | |
| CR001030 | TCTTGACTCAGAAACCCTGTTCTCCTCTACATATCTCCCC | 5.20% | −1 |
| PS sg | ACC-CATCTCTTTCAGCAGTTGTTTCTAAAAATATCCTCC | | |
| CR001030 | TCTTGACTCAGAAACCCTGTTCTCCTCTACATATCTCCCC | 3.65% | 1 |
| PS sg | ACCGgCATCTCTTTCAGCAGTTGTTTCTAAAAATATCCTCC | | |
| CR001030 | TCTTGACTCAGAAACCCTGTTCTCCTCTACATATCTCCCC | 3.33% | −2 |
| PS sg | ACC--ATCTCTTTCAGCAGTTGTTTCTAAAAATATCCTCC | | |
| CR001030 | TCTTGACTCAGAAACCCTGTTCTCCTCTACATATCTCCCC | 2.92% | −5 |
| PS sg | A-----TCTCTTTCAGCAGTTGTTTCTAAAAATATCCTCC | | |
| CR001030 | TCTTGACTCAGAAACCCTGTTCTCCTCTACAT--------------- | 2.14% | −15 |
| PS sg | CTCTTTCAGCAGTTGTTTCTAAAAATATCCTCC | | |
| CR001030 | TCTTGACTCAGAAACCCTGTTCTC-------------------------- | 2.08% | −26 |
| PS sg | TTTCAGCAGTTGTTTCTAAAAATATCCTCC | | |
| CR001030 | TCTTGACTCAGAAACCCTGTTCTCCTCTACATATCTC-------- | 11.22% | −13 |
| sg | -----TTTCAGCAGTTGTTTCTAAAAATATCCTCC | | |
| CR001030 | TCTTGACTCAGAAACCCTGTTCTCCTCTACATATCTCCCC | 4.64% | −1 |
| sg | ACC-CATCTCTTTCAGCAGTTGTTTCTAAAAATATCCTCC | | |
| CR001030 | TCTTGACTCAGAAACCCTGTTCTCCTCTACATATCTCCCC | 2.78% | 1 |
| sg | ACCGgCATCTCTTTCAGCAGTTGTTTCTAAAAATATCCTCC | | |
| CR001030 | TCTTGACTCAGAAACCCTGTTCTCCTCTACATATCTCCCC | 2.73% | −5 |
| sg | A-----TCTCTTTCAGCAGTTGTTTCTAAAAATATCCTCC | | |
| CR001030 | TCTTGACTCAGAAACCCTGTTCTCCTCTACATATCTCCCC | 2.34% | −1 |
| sg | AC-GCATCTCTTTCAGCAGTTGTTTCTAAAAATATCCTCC | | |
| CR001030 | TCTTGACTCAGAAACCCTGTTCTCCTCTACATATCTCCCC | 2.29% | −6 |
| sg | AC------TCTTTCAGCAGTTGTTTCTAAAAATATCCTCC | | |
| CR001137 | AAATGCTTATGACAGCAATAATCATAAAAACCTCAAACC | 4.26% | 1 |
| | GGTAGgCCACTTAAATGCTTACCAACAGTAGAATTGATAA | | |
| | AT | | |
| CR001137 | AAATGCTTATGACAGCAATAATCATAAAAACCTCAAACC- | 3.80% | −7 |
| | ------ACTTAAATGCTTACCAACAGTAGAATTGATAAAT | | |
| CR001137 | AAATGCTTATGACAGCAATAATCATAAAAACCTCAAACC | 1.32% | 1 |
| | GGTAaGCCACTTAAATGCTTACCAACAGTAGAATTGATAA | | |
| | AT | | |
| CR001137 | AAATGCTTATGACAGCAATAATCATAAAAACCTCAAACC | 0.98% | −8 |
| | GGTA--------AATGCTTACCAACAGTAGAATTGATAAAT | | |
| CR001137 | AAATGCTTATGACAGCAATAATCATAAAAACCTCAAACC | 0.97% | −7 |
| | GGT-------TAAATGCTTACCAACAGTAGAATTGATAAAT | | |
| CR001137 | AAATGCTTATGACAGCAATAATCATAAAAACCTCAAA----- | 0.85% | −6 |
| | -GCCACTTAAATGCTTACCAACAGTAGAATTGATAAAT | | |
| CR001137 | AAATGCTTATGACAGCAATAATCATAAAAACCTCAAACC | 0.73% | −1 |
| | GGT- | | |
| | GCCACTTAAATGCTTACCAACAGTAGAATTGATAAAT | | |
| CR001137 | AAATGCTTATGACAGCAATAATCATAAAAACCTCAAACC | 19.40% | 1 |
| OMePS sg | GGTAGgCCACTTAAATGCTTACCAACAGTAGAATTGATAA | | |
| | AT | | |
| CR001137 | AAATGCTTATGACAGCAATAATCATAAAAACCTCAAACC- | 7.73% | −7 |
| OMePS sg | ------ACTTAAATGCTTACCAACAGTAGAATTGATAAAT | | |
| CR001137 | AAATGCTTATGACAGCAATAATCATAAAAACCTCAA------- | 2.97% | −7 |
| OMePS sg | GCCACTTAAATGCTTACCAACAGTAGAATTGATAAAT | | |
| CR001137 | AAATGCTTATGACAGCAATAATCATAAAAACCTCAAACC | 2.78% | −8 |
| OMePS sg | GGTA--------AATGCTTACCAACAGTAGAATTGATAAAT | | |
| CR001137 | AAATGCTTATGACAGCAATAATCATAAAAACCTCAAACC | 2.27% | 1 |
| OMePS sg | GGTAaGCCACTTAAATGCTTACCAACAGTAGAATTGATAA | | |
| | AT | | |
| CR001137 | AAATGCTTATGACAGCAATAAT----------------------------------- | 2.06% | −35 |
| OMePS sg | TACCAACAGTAGAATTGATAAAT | | |
| CR001137 | AAATGCTTATGACAGCAATAATCATAAAAACCTCAAA----- | 2.04% | −16 |
| OMePS sg | -----------TGCTTACCAACAGTAGAATTGATAAAT | | |
| CR001137 | AAATGCTTATGACAGCAATAATCATAAAAACCTCAAACC | 5.27% | 1 |
| OMePS | GGTAGgCCACTTAAATGCTTACCAACAGTAGAATTGATAA | | |
| | AT | | |
| CR001137 | AAATGCTTATGACAGCAATAATCATAAAAACCTCAAACC- | 4.66% | −7 |
| OMePS | ------ACTTAAATGCTTACCAACAGTAGAATTGATAAAT | | |
| CR001137 | AAATGCTTATGACAGCAATAATCATAAAAACCTCAAACC | 2.38% | −8 |
| OMePS | GGTA--------AATGCTTACCAACAGTAGAATTGATAAAT | | |
| CR001137 | AAATGCTTATGACAGCAATAATCATAAAAACCTCAAACC | 1.91% | −7 |
| OMePS | GGT-------TAAATGCTTACCAACAGTAGAATTGATAAAT | | |
| CR001137 | AAATGCTTATGACAGCAATAATCATAAAAACCTCAAACC | 1.72% | 1 |
| OMePS | GGTAaGCCACTTAAATGCTTACCAACAGTAGAATTGATAA | | |
| | AT | | |
| CR001137 | AAATGCTTATGACAGCAATAATCATAAAAACCTCAA------- | 1.03% | −7 |
| OMePS | GCCACTTAAATGCTTACCAACAGTAGAATTGATAAAT | | |
| CR001137 | AAATGCTTATGACAGCAATAATCATAAAAACCTCA-------- | 0.82% | −8 |
| OMePS | GCCACTTAAATGCTTACCAACAGTAGAATTGATAAAT | | |
| CR001137 | AAATGCTTATGACAGCAATAATCATAAAAACCTCAAACC- | 7.49% | −7 |
| PS | ------ACTTAAATGCTTACCAACAGTAGAATTGATAAAT | | |
| CR001137 | AAATGCTTATGACAGCAATAATCATAAAAACCTCAAACC | 6.85% | 1 |
| PS | GGTAGgCCACTTAAATGCTTACCAACAGTAGAATTGATAA | | |
| | AT | | |
| CR001137 | AAATGCTTATGACAGCAATAATCATAAAAACCTCAAACC | 2.64% | −8 |
| PS | GGTA--------AATGCTTACCAACAGTAGAATTGATAAAT | | |
| CR001137 | AAATGCTTATGACAGCAATAATCATAAAAACCTCAAACC | 2.11% | 1 |
| PS | GGTAaGCCACTTAAATGCTTACCAACAGTAGAATTGATAA | | |
| | AT | | |
| CR001137 | AAATGCTTATGACAGCAATAATCATAAAAACCTCAAACC | 1.91% | −3 |
| PS | GG---CCACTTAAATGCTTACCAACAGTAGAATTGATAAAT | | |
| CR001137 | AAATGCTTATGACAGCAATAATCATAAAAACCTCAAAC--- | 1.81% | −10 |
| PS | -------TTAAATGCTTACCAACAGTAGAATTGATAAAT | | |
| CR001137 | AAATGCTTATGACAGCAATAATCATAAAAACCTCAAACC | 1.28% | −7 |
| PS | GGT-------TAAATGCTTACCAACAGTAGAATTGATAAAT | | |
| CR001137 | AAATGCTTATGACAGCAATAATCATAAAAACCTCAAACC | 11.90% | 1 |
| PS sg | GGTAGgCCACTTAAATGCTTACCAACAGTAGAATTGATAA | | |
| | AT | | |
| CR001137 | AAATGCTTATGACAGCAATAATCATAAAAACCTCAAACC- | 7.45% | −7 |
| PS sg | ------ACTTAAATGCTTACCAACAGTAGAATTGATAAAT | | |
| CR001137 | AAATGCTTATGACAGCAATAATCATAAAAACCTCAAACC | 4.87% | −25 |
| PS sg | GGTAG-------------------------AATTGATAAAT | | |
| CR001137 | AAATGCTTATGACAGCAATAATCATAAAAACCTCAAACC | 3.82% | −1 |
| PS sg | GGT- | | |
| | GCCACTTAAATGCTTACCAACAGTAGAATTGATAAAT | | |
| CR001137 | AAATGCTTATGACAGCAATAATCATAAAAACCTCAAACC | 3.57% | 1 |
| PS sg | GGTAaGCCACTTAAATGCTTACCAACAGTAGAATTGATAA | | |
| | AT | | |
| CR001137 | AAATGCTTATGACAGCAATAATCATAAAAACCTCAAACC | 2.81% | −1 |
| PS sg | GGTA- | | |
| | CCACTTAAATGCTTACCAACAGTAGAATTGATAAAT | | |
| CR001137 | AAATGCTTATGACAGCAATAATCATAAAAACCTCAAACC | 2.35% | −3 |
| PS sg | GGTA---ACTTAAATGCTTACCAACAGTAGAATTGATAAAT | | |
| CR001137 | AAATGCTTATGACAGCAATAATCATAAAAACCTCAAACC- | 6.84% | −7 |
| sg | ------ACTTAAATGCTTACCAACAGTAGAATTGATAAAT | | |
| CR001137 | AAATGCTTATGACAGCAATAATCATAAAAACCTCAAACC | 4.54% | 1 |
| sg | GGTAGgCCACTTAAATGCTTACCAACAGTAGAATTGATAA | | |
| | AT | | |
| CR001137 | AAATGCTTATGACAGCAATAATCATAAAAACCTCAAACC | 2.46% | 1 |
| sg | GGTAaGCCACTTAAATGCTTACCAACAGTAGAATTGATAA | | |
| | AT | | |
| CR001137 | AAATGCTTATGACAGCAATAATCATAAAAACCTCAAACC | 1.83% | −7 |
| sg | GGT-------TAAATGCTTACCAACAGTAGAATTGATAAAT | | |
| CR001137 | AAATGCTTATGACAGCAATAATCATAAAAACCTCAAACC | 1.11% | −8 |
| sg | GGTA--------AATGCTTACCAACAGTAGAATTGATAAAT | | |
| CR001137 | AAATGCTTATGACAGCAATAATCATAAAAACCTCAAACC | 0.78% | −4 |
| sg | GGTA----CTTAAATGCTTACCAACAGTAGAATTGATAAAT | | |
| CR001137 | AAATGCTTATGACAGCAATAATCATAAAAACCTCAAACC | 0.72% | 1 |
| sg | GGTAtGCCACTTAAATGCTTACCAACAGTAGAATTGATAA | | |
| | AT | | |
| CR001221 | TAGCATCTACTCTTGTTCAGGAAACAATGAGGACCTG---- | 29.13% | −4 |
| | GGCAGTAAGAGTGGTGATTAATAGATAGGGACAAATTGA | | |
| CR001221 | TAGCATCTACTCTTGTTCAGGAAACAATGAGGACCT- | 4.65% | −1 |
| | ACTGGGCAGTAAGAGTGGTGATTAATAGATAGGGACAAA | | |
| | TTGA | | |
| CR001221 | TAGCATCTACTCTTGTTCAGGAAACAATGAGGAC----- | 4.27% | −5 |
| | TGGGCAGTAAGAGTGGTGATTAATAGATAGGGACAAATT | | |
| | GA | | |
| CR001221 | TAGCATCTACTCTTGTTCAGGAAACAATGAGG---------- | 1.47% | −10 |
| | GCAGTAAGAGTGGTGATTAATAGATAGGGACAAATTGA | | |
| CR001221 | TAGCATCTACTCTTGTTCAGGAAACAATGAGGAC---------- | 1.14% | −10 |
| | AGTAAGAGTGGTGATTAATAGATAGGGACAAATTGA | | |
| CR001221 | TAGCATCTACTCTTGTTCAGG------------------------- | 1.04% | −25 |
| | TAAGAGTGGTGATTAATAGATAGGGACAAATTGA | | |
| CR001221 | TAGCATCTACTCTTGTTCAGGAAACAATGAGGACCTtACT | 0.86% | 0 |
| | GGGCAGTAAGAGTGGTGATTAATAGATAGGGACAAATTGA | | |
| CR001221 | TAGCATCTACTCTTGTTCAGGAAACAATGAGGACCTG---- | 26.33% | −4 |
| OMePS sg | GGCAGTAAGAGTGGTGATTAATAGATAGGGACAAATTGA | | |
| CR001221 | TAGCATCTACTCTTGTTCAGGAAACAATGAGGACCT- | 15.83% | −1 |
| OMePS sg | ACTGGGCAGTAAGAGTGGTGATTAATAGATAGGGACAAA | | |
| | TTGA | | |
| CR001221 | TAGCATCTACTCTTGTTCAGGAAACAATGAGGAC----- | 6.26% | −5 |
| OMePS sg | TGGGCAGTAAGAGTGGTGATTAATAGATAGGGACAAATT | | |
| | GA | | |
| CR001221 | TAGCATCTACTCTTGTTCAGGAAACAATGAGGACCTG-- | 3.75% | −2 |
| OMePS sg | TGGGCAGTAAGAGTGGTGATTAATAGATAGGGACAAATT | | |
| | GA | | |
| CR001221 | TAGCATCTACTCTTGTTCAGGAAACAATGAGGACCTGtAC | 2.61% | 1 |
| OMePS sg | TGGGCAGTAAGAGTGGTGATTAATAGATAGGGACAAATT | | |
| | GA | | |
| CR001221 | TAGCATCTACTCTTGTTCAGGAAACAATGAGGAC---------- | 2.15% | −10 |
| OMePS sg | AGTAAGAGTGGTGATTAATAGATAGGGACAAATTGA | | |
| CR001221 | TAGCATCTACTCTTGTTCAGGAAACAATGAGGACCTGAaC | 1.82% | 1 |
| OMePS sg | TGGGCAGTAAGAGTGGTGATTAATAGATAGGGACAAATT | | |
| | GA | | |
| CR001221 | TAGCATCTACTCTTGTTCAGGAAACAATGAGGACCTG---- | 32.73% | −4 |
| OMePS | GGCAGTAAGAGTGGTGATTAATAGATAGGGACAAATTGA | | |
| CR001221 | TAGCATCTACTCTTGTTCAGGAAACAATGAGGACCT- | 6.46% | −1 |
| OMePS | ACTGGGCAGTAAGAGTGGTGATTAATAGATAGGGACAAA | | |
| | TTGA | | |
| CR001221 | TAGCATCTACTCTTGTTCAGGAAACAATGAGGAC----- | 5.49% | −5 |
| OMePS | TGGGCAGTAAGAGTGGTGATTAATAGATAGGGACAAATT | | |
| | GA | | |
| CR001221 | TAGCATCTACTCTTGTTCAGGAAACAATGAGG----------- | 3.16% | −11 |
| OMePS | CAGTAAGAGTGGTGATTAATAGATAGGGACAAATTGA | | |
| CR001221 | TAGCATCTACTCTTGTTCAGGAAACAATGAGG---------- | 2.03% | −10 |
| OMePS | GCAGTAAGAGTGGTGATTAATAGATAGGGACAAATTGA | | |
| CR001221 | TAGCATCTACTCTTGTTCAGGAAACAATGAGGACCTGtAC | 1.53% | 1 |
| OMePS | TGGGCAGTAAGAGTGGTGATTAATAGATAGGGACAAATT | | |
| | GA | | |
| CR001221 | TAGCATCTACTCTTGTTCAGGAAACAATG------------ | 1.05% | −12 |
| OMePS | GGCAGTAAGAGTGGTGATTAATAGATAGGGACAAATTGA | | |
| CR001221 | TAGCATCTACTCTTGTTCAGGAAACAATGAGGACCTG---- | 33.94% | −4 |
| PS | GGCAGTAAGAGTGGTGATTAATAGATAGGGACAAATTGA | | |
| CR001221 | TAGCATCTACTCTTGTTCAGGAAACAATGAGGACCT- | 7.39% | −1 |
| PS | ACTGGGCAGTAAGAGTGGTGATTAATAGATAGGGACAAA | | |
| | TTGA | | |
| CR001221 | TAGCATCTACTCTTGTTCAGGAAACAATGAGGAC----- | 5.05% | −5 |
| PS | TGGGCAGTAAGAGTGGTGATTAATAGATAGGGACAAATT | | |
| | GA | | |
| CR001221 | TAGCATCTACTCTTGTTCAGGAAACAATGAGGAC---------- | 4.03% | −10 |
| PS | AGTAAGAGTGGTGATTAATAGATAGGGACAAATTGA | | |
| CR001221 | TAGCATCTACTCTTGTTCAGGAAACAATGAGGACCTGtAC | 1.52% | 1 |
| PS | TGGGCAGTAAGAGTGGTGATTAATAGATAGGGACAAATT | | |
| | GA | | |
| CR001221 | TAGCATCTACTCTTGTTCAGGAAACAATG------------ | 1.48% | −12 |
| PS | GGCAGTAAGAGTGGTGATTAATAGATAGGGACAAATTGA | | |
| CR001221 | TAGCATCTACTCTTGTTCAGGAAACAATGAGG----------- | 1.43% | −11 |
| PS | CAGTAAGAGTGGTGATTAATAGATAGGGACAAATTGA | | |
| CR001221 | TAGCATCTACTCTTGTTCAGGAAACAATGAGGACCTG---- | 27.00% | −4 |
| PS sg | GGCAGTAAGAGTGGTGATTAATAGATAGGGACAAATTGA | | |
| CR001221 | TAGCATCTACTCTTGTTCAGGAAACAATGAGGACCT- | 13.43% | −1 |
| PS sg | ACTGGGCAGTAAGAGTGGTGATTAATAGATAGGGACAAA | | |
| | TTGA | | |
| CR001221 | TAGCATCTACTCTTGTTCAGGAAACAATGAGGAC----- | 6.57% | −5 |
| PS sg | TGGGCAGTAAGAGTGGTGATTAATAGATAGGGACAAATT | | |
| | GA | | |
| CR001221 | TAGCATCTACTCTTGTTCAGGAAACAATGAGGACCTGtAC | 4.28% | 1 |
| PS sg | TGGGCAGTAAGAGTGGTGATTAATAGATAGGGACAAATT | | |
| | GA | | |
| CR001221 | TAGCATCTACTCTTGTTCAGGAAACAATGAGGACC-- | 3.13% | −2 |
| PS sg | ACTGGGCAGTAAGAGTGGTGATTAATAGATAGGGACAAA | | |
| | TTGA | | |
| CR001221 | TAGCATCTACTCTTGTTCAGGAAACAATGAGGAC---------- | 2.40% | −10 |
| PS sg | AGTAAGAGTGGTGATTAATAGATAGGGACAAATTGA | | |
| CR001221 | TAGCATCTACTCTTGTTCAGGAAACAATGAGGACCTG------ | 2.13% | −8 |
| PS sg | --GTAAGAGTGGTGATTAATAGATAGGGACAAATTGA | | |
| CR001221 | TAGCATCTACTCTTGTTCAGGAAACAATGAGGACCTG---- | 26.35% | −4 |
| sg | GGCAGTAAGAGTGGTGATTAATAGATAGGGACAAATTGA | | |
| CR001221 | TAGCATCTACTCTTGTTCAGGAAACAATGAGGACCT- | 8.55% | −1 |
| sg | ACTGGGCAGTAAGAGTGGTGATTAATAGATAGGGACAAA | | |
| | TTGA | | |
| CR001221 | TAGCATCTACTCTTGTTCAGGAAACAATGAGGAC----- | 7.25% | −5 |
| sg | TGGGCAGTAAGAGTGGTGATTAATAGATAGGGACAAATT | | |
| | GA | | |
| CR001221 | TAGCATCTACTCTTGTTCAGGAAACAATGAGGAC---------- | 2.41% | −10 |
| sg | AGTAAGAGTGGTGATTAATAGATAGGGACAAATTGA | | |
| CR001221 | TAGCATCTACTCTTGTTCAGGAAACAATGAGG----------- | 1.90% | −11 |
| sg | CAGTAAGAGTGGTGATTAATAGATAGGGACAAATTGA | | |
| CR001221 | TAGCATCTACTCTTGTTCAGGAAACAATGAGGACCTG------ | 1.82% | −9 |
| sg | ---TAAGAGTGGTGATTAATAGATAGGGACAAATTGA | | |
| CR001221 | TAGCATCTACTCTTGTTCAGGAAACAATG------------ | 1.81% | −12 |
| sg | GGCAGTAAGAGTGGTGATTAATAGATAGGGACAAATTGA | | |
| CR003035 | CTGGAAGAGAAACAGTTTTAGTATAACAAGTGAAATACC | 12.23% | −3 |
| | CATG---AGTCTGAGGTGCCTATAGGACATCTATATAAATA | | |
| CR003035 | CTGGAAGAGAAAtAGTTTTAGTATAACAAGTGAAATACCC | 8.25% | 0 |
| | ATGCTGAGTCTGAGGTGCCTATAGGACATCTATATAAATA | | |
| CR003035 | CTGGAAGAGAAAtAGTTTTAGTATAACAAGTGAAATACCC | 4.47% | −3 |
| | ATG---AGTCTGAGGTGCCTATAGGACATCTATATAAATA | | |
| CR003035 | CTGGAAGAGAAACAGTTTTAGTATAACAAGTGAAATACC | 3.60% | −1 |
| | CAT- | | |
| | CTGAGTCTGAGGTGCCTATAGGACATCTATATAAATA | | |
| CR003035 | CTGGAAGAGAAACAGTTTTAGTATAACAAGTGA------------- | 2.79% | −14 |
| | -GTCTGAGGTGCCTATAGGACATCTATATAAATA | | |
| CR003035 | CTGGAAGAGAAACAGTTTTAGTATAACAAGTGAAATACC | 2.55% | −2 |
| | CATG-- | | |
| | GAGTCTGAGGTGCCTATAGGACATCTATATAAATA | | |
| CR003035 | CTGGAAGAGAAACAGTTTTAGTATAACAAGTGAAATAC--- | 1.68% | −6 |
| | ---TGAGTCTGAGGTGCCTATAGGACATCTATATAAATA | | |
| CR003035 | CTGGAAGAGAAACAGTTTTAGTATAACAAGTGAAATACC | 13.59% | −3 |
| OMePS sg | CATG---AGTCTGAGGTGCCTATAGGACATCTATATAAATA | | |
| CR003035 | CTGGAAGAGAAACAGTTTTAGTATAACAAGTGAAATACC | 5.56% | −2 |
| OMePS sg | CA--CTGAGTCTGAGGTGCCTATAGGACATCTATATAAATA | | |
| CR003035 | CTGGAAGAGAAACAGTTTTAGTATAACAAGTGAAATACC | 5.34% | −1 |
| OMePS sg | CAT- | | |
| | CTGAGTCTGAGGTGCCTATAGGACATCTATATAAATA | | |
| CR003035 | CTGGAAGAGAAACAGTTTTAGTATAACAAGTGAAATACC | 5.30% | −2 |
| OMePS sg | CATG-- | | |
| | GAGTCTGAGGTGCCTATAGGACATCTATATAAATA | | |
| CR003035 | CTGGAAGAGAAACAGTTTTAGTATAACAAGTGA------------- | 4.70% | −14 |
| OMePS sg | -GTCTGAGGTGCCTATAGGACATCTATATAAATA | | |
| CR003035 | CTGGAAGAGAAAtAGTTTTAGTATAACAAGTGAAATACCC | 4.44% | −3 |
| OMePS sg | ATG---AGTCTGAGGTGCCTATAGGACATCTATATAAATA | | |
| CR003035 | CTGGAAGAGAAACAGTTTTAGTATAACAAGTGAAATACC | 2.05% | −1 |
| OMePS sg | CATG- | | |
| | TGAGTCTGAGGTGCCTATAGGACATCTATATAAATA | | |
| CR003035 | CTGGAAGAGAAACAGTTTTAGTATAACAAGTGAAATACC | 9.22% | −3 |
| OMePS | CATG---AGTCTGAGGTGCCTATAGGACATCTATATAAATA | | |
| CR003035 | CTGGAAGAGAAAtAGTTTTAGTATAACAAGTGAAATACCC | 7.81% | 0 |
| OMePS | ATGCTGAGTCTGAGGTGCCTATAGGACATCTATATAAATA | | |
| CR003035 | CTGGAAGAGAAAtAGTTTTAGTATAACAAGTGAAATACCC | 3.79% | −3 |
| OMePS | ATG---AGTCTGAGGTGCCTATAGGACATCTATATAAATA | | |
| CR003035 | CTGGAAGAGAAACAGTTTTAGTATAACAAGTGAAATACC | 2.63% | −1 |
| OMePS | CAT- | | |
| | CTGAGTCTGAGGTGCCTATAGGACATCTATATAAATA | | |
| CR003035 | CTGGAAGAGAAACAGTTTTAGTATAACAAGTGAAATACC | 2.00% | −2 |
| OMePS | CA--CTGAGTCTGAGGTGCCTATAGGACATCTATATAAATA | | |
| CR003035 | CTGGAAGAGAAACAGTTTTAGTATAACAAGTGA------------- | 1.92% | −14 |
| OMePS | -GTCTGAGGTGCCTATAGGACATCTATATAAATA | | |
| CR003035 | CTGGAAGAGAAACAGTTTTAGTATAACAAGTGAAATACC- | 1.69% | −5 |
| OMePS | ----TGAGTCTGAGGTGCCTATAGGACATCTATATAAATA | | |
| CR003035 | CTGGAAGAGAAACAGTTTTAGTATAACAAGTGAAATACC | 13.91% | −3 |
| PS | CATG---AGTCTGAGGTGCCTATAGGACATCTATATAAATA | | |
| CR003035 | CTGGAAGAGAAAtAGTTTTAGTATAACAAGTGAAATACCC | 6.11% | −3 |
| PS | ATG---AGTCTGAGGTGCCTATAGGACATCTATATAAATA | | |
| CR003035 | CTGGAAGAGAAAtAGTTTTAGTATAACAAGTGAAATACCC | 3.77% | 0 |
| PS | ATGCTGAGTCTGAGGTGCCTATAGGACATCTATATAAATA | | |
| CR003035 | CTGGAAGAGAAACAGTTTTAGTATAACAAGTGAAATACC | 3.64% | −1 |
| PS | CAT- | | |
| | CTGAGTCTGAGGTGCCTATAGGACATCTATATAAATA | | |
| CR003035 | CTGGAAGAGAAACAGTTTTAGTATAACAAGTGAAATACC | 2.39% | −2 |
| PS | CATG-- | | |
| | GAGTCTGAGGTGCCTATAGGACATCTATATAAATA | | |
| CR003035 | CTGGAAGAGAAACAGTTTTAGTATAACAAGTGAAATACC | 2.16% | −2 |
| PS | CA--CTGAGTCTGAGGTGCCTATAGGACATCTATATAAATA | | |
| CR003035 | CTGGAAGAGAAAtAGTTTTAGTATAACAAGTGAAATACCC | 1.87% | −1 |
| PS | AT-CTGAGTCTGAGGTGCCTATAGGACATCTATATAAATA | | |
| CR003035 | CTGGAAGAGAAACAGTTTTAGTATAACAAGTGAAATACC | 8.32% | −1 |
| PS sg | CAT- | | |
| | CTGAGTCTGAGGTGCCTATAGGACATCTATATAAATA | | |
| CR003035 | CTGGAAGAGAAACAGTTTTAGTATAACAAGTGAAATACC | 6.41% | −3 |
| PS sg | CATG---AGTCTGAGGTGCCTATAGGACATCTATATAAATA | | |
| CR003035 | CTGGAAGAGAAACAGTTTTAGTATAACAAGTGAAATACC | 4.19% | −2 |
| PS sg | CATG-- | | |
| | GAGTCTGAGGTGCCTATAGGACATCTATATAAATA | | |
| CR003035 | CTGGAAGAGAAACAGTTTTAGTATAACAAGTGAAATACC | 4.08% | −2 |
| PS sg | CA--CTGAGTCTGAGGTGCCTATAGGACATCTATATAAATA | | |
| CR003035 | CTGGAAGAGAAAtAGTTTTAGTATAACAAGTGAAATACCC | 3.31% | −1 |
| PS sg | AT-CTGAGTCTGAGGTGCCTATAGGACATCTATATAAATA | | |
| CR003035 | CTGGAAGAGAAACAGTTTTAGTATAACAAGTGAAATACC | 2.99% | −4 |
| PS sg | C----TGAGTCTGAGGTGCCTATAGGACATCTATATAAATA | | |
| CR003035 | CTGGAAGAGAAACAGTTTTAGTATAACAAGTGAAATACC- | 2.23% | −5 |
| PS sg | ----TGAGTCTGAGGTGCCTATAGGACATCTATATAAATA | | |
| CR003035 | CTGGAAGAGAAACAGTTTTAGTATAACAAGTGAAATACC | 10.92% | −3 |
| sg | CATG---AGTCTGAGGTGCCTATAGGACATCTATATAAATA | | |
| CR003035 | CTGGAAGAGAAAtAGTTTTAGTATAACAAGTGAAATACCC | 6.05% | −3 |
| sg | ATG---AGTCTGAGGTGCCTATAGGACATCTATATAAATA | | |
| CR003035 | CTGGAAGAGAAACAGTTTTAGTATAACAAGTGAAATACC | 5.42% | −1 |
| sg | CAT- | | |
| | CTGAGTCTGAGGTGCCTATAGGACATCTATATAAATA | | |
| CR003035 | CTGGAAGAGAAAtAGTTTTAGTATAACAAGTGAAATACCC | 4.55% | 0 |
| sg | ATGCTGAGTCTGAGGTGCCTATAGGACATCTATATAAATA | | |
| CR003035 | CTGGAAGAGAAACAGTTTTAGTATAACAAGTGAAATACC | 4.53% | −2 |
| sg | CA--CTGAGTCTGAGGTGCCTATAGGACATCTATATAAATA | | |
| CR003035 | CTGGAAGAGAAACAGTTTTAGTATAACAAGTGAAATACC | 3.59% | −2 |
| sg | CATG-- | | |
| | GAGTCTGAGGTGCCTATAGGACATCTATATAAATA | | |
| CR003035 | CTGGAAGAGAAACAGTTTTAGTATAACAAGTGAAATACC | 2.30% | −4 |
| sg | C----TGAGTCTGAGGTGCCTATAGGACATCTATATAAATA | | |
| CR001128 | GTCTAGTGCAAGCTAACAGTTGCTTTTATCACAGGCTCCA | 10.38% | −1 |
| | GGA-GGGTTTGGCCTCTGATTAGGGTGGGGGCGTGGGTGG | | |
| CR001128 | GTCTAGTGCAAGCTAACAGTTGCTTTTATCACAGGCTCCA | 5.87% | −4 |
| | GG----GTTTGGCCTCTGATTAGGGTGGGGGCGTGGGTGG | | |
| CR001128 | GTCTAGTGCAAGCTAACAGTTGCTTTTATCACAGGCTCCA | 5.50% | 1 |
| | GGAAaGGGTTTGGCCTCTGATTAGGGTGGGGGCGTGGGT | | |
| | GG | | |
| CR001128 | GTCTAGTGCAAGCTAACAGTTGCTTTTATCACAGGCTCCA | 4.87% | −5 |
| | GG-----TTTGGCCTCTGATTAGGGTGGGGGCGTGGGTGG | | |
| CR001128 | GTCTAGTGCAAGCTAACAGTTGCTTTTATCACAGGC-------- | 4.61% | −36 |
| | ----------------------------GTGGGTGG | | |
| CR001128 | GTCTAGTGCAAGCTAACAaC---------------------------- | 2.38% | −28 |
| | ATCACAGGCTCCAGGATAGGGGGCGTGGGTGG | | |
| CR001128 | GTCTAGTGCAAGCTAACAGTTGCTTTTATCACAGGCTCCA | 2.00% | −2 |
| | GGA--GGTTTGGCCTCTGATTAGGGTGGGGGCGTGGGTGG | | |
| CR001128 | GTCTAGTGCAAGCTAACAGTTGCTTTTATCACAGGCTCCA | 7.56% | −23 |
| OMePS | GG-----------------------TGGGGGCGTGGGTGG | | |
| CR001128 | GTCTAGTGCAAGCTAACAGTTGCTTTTATCACAGGCTCCA | 6.53% | −4 |
| OMePS | GG----GTTTGGCCTCTGATTAGGGTGGGGGCGTGGGTGG | | |
| CR001128 | GTCTAGTGCAAGCTAACAGTTGCTTTTATCACAGGCTCCA | 6.18% | −5 |
| OMePS | GG-----TTTGGCCTCTGATTAGGGTGGGGGCGTGGGTGG | | |
| CR001128 | GTCTAGTGCAAGCTAACAGTTGCTTTTATCACAGGCTCCA | 6.06% | −1 |
| OMePS | GGA-GGGTTTGGCCTCTGATTAGGGTGGGGGCGTGGGTGG | | |
| CR001128 | GTCTAGTGCAAGCTAACAGTTGCTTTTATCACAGGCTCCA | 3.92% | 1 |
| OMePS | GGAAaGGGTTTGGCCTCTGATTAGGGTGGGGGCGTGGGT | | |
| | GG | | |
| CR001128 | GTCTAGTGCAAGCTAACAGTTGCTTTTATCACAGGCTCCA | 2.55% | −10 |
| OMePS | GG----------CCTCTGATTAGGGTGGGGGCGTGGGTGG | | |
| CR001128 | GTCTAGTGCAAGCTAACAGTTGCTTTTATCACAGGCTCCA | 10.12% | −1 |
| sg | GGA-GGGTTTGGCCTCTGATTAGGGTGGGGGCGTGGGTGG | | |
| CR001128 | GTCTAGTGCAAGCTAACAGTTGCTTTTATCACAGGCTCCA | 7.05% | −5 |
| sg | GG-----TTTGGCCTCTGATTAGGGTGGGGGCGTGGGTGG | | |
| CR001128 | GTCTAGTGCAAGCTAACAGTTGCTTTTATCACAGGCTCCA | 4.59% | −4 |
| sg | GG----GTTTGGCCTCTGATTAGGGTGGGGGCGTGGGTGG | | |
| CR001128 | GTCTAGTGCAAGCTAACAGTTGCTTTTATCACAGGCTCCA | 4.24% | 1 |
| sg | GGAAaGGGTTTGGCCTCTGATTAGGGTGGGGGCGTGGGT | | |
| | GG | | |
| CR001128 | GTCTAGTGCAAGCTAACAGTTGCTTTTATCACAGGCTCCA | 2.21% | −27 |
| sg | GG---------------------------GGCGTGGGTGG | | |
| CR001128 | GTCTAGTGCAAGCTAACAGTTGCTTTTATCACAGGCTCCA | 1.66% | −30 |
| sg | G------------------------------CGTGGGTGG | | |
| CR001128 | GTCTAGTGCAAGCTAACAGTTGCTTTTATCACAGGC-------- | 1.48% | −17 |
| sg | ---------CTCTGATTAGGGTGGGGGCGTGGGTGG | | |
| CR001128 | GTCTAGTGCAAGCTAACAGTTGCTTTTATCACAGGCTCCA | 10.59% | −5 |
| sg OMePS | GG-----TTTGGCCTCTGATTAGGGTGGGGGCGTGGGTGG | | |
| CR001128 | GTCTAGTGCAAGCTAACAGTTGCTTTTATCACAGGCTCCA | 7.59% | −4 |
| sg OMePS | GG----GTTTGGCCTCTGATTAGGGTGGGGGCGTGGGTGG | | |
| CR001128 | GTCTAGTGCAAGCTAACAGTTGCTTTTATCACAGGCTCCA | 5.92% | −1 |
| sg OMePS | GGA-GGGTTTGGCCTCTGATTAGGGTGGGGGCGTGGGTGG | | |
| CR001128 | GTCTAGTGCAAGCTAACAGTTGCTTTTATCACAGGCTCCA | 3.38% | 1 |
| sg OMePS | GGAAaGGGTTTGGCCTCTGATTAGGGTGGGGGCGTGGGT | | |
| | GG | | |
| CR001128 | GTCTAGTGCAAGCTAACAGTTGCTTTTATCACAGGCTCCA | 2.49% | 2 |
| sg OMePS | GGAAGagGGTTTGGCCTCTGATTAGGGTGGGGGCGTGGGT | | |
| | GG | | |
| CR001128 | GTCTAGTGCAAGCTAACAGTTGCTTTTATCACAGGCTCCA | 1.95% | −16 |
| sg OMePS | GGA----------------TTAGGGTGGGGGCGTGGGTGG | | |
| CR001128 | GTCTAGTGCAAGCTAACAGTTGCTTTTATCACAGGCTCCA | 1.85% | −2 |
| sg OMePS | GGA--GGTTTGGCCTCTGATTAGGGTGGGGGCGTGGGTGG | | |
| CR000312 | TATCACAGGCTCCAGGAAGGGTTTGGCCTCTGATTAGG- | 11.83% | −1 |
| | TGGGGGCGTGGGTGGGGTAGAAGAGGACTGGCAGACCTC | | |
| | TC | | |
| CR000312 | TATCACAGGCTCCAGGAAGGGTTTGG---------------- | 5.11% | −16 |
| | GGGCGTGGGTGGGGTAGAAGAGGACTGGCAGACCTCTC | | |
| CR000312 | TATCACAGGCTCCAGGAAGGGTTTGGC------------------- | 4.33% | −19 |
| | GTGGGTGGGGTAGAAGAGGACTGGCAGACCTCTC | | |
| CR000312 | TATCACAGGCTCCAGGAAGGGTTTGGCCTCTGATT-- | 3.63% | −2 |
| | GGTGGGGGCGTGGGTGGGGTAGAAGAGGACTGGCAGAC | | |
| | CTCTC | | |
| CR000312 | TATCACAGGCTCCAGGAAGGG----------------------- | 2.50% | −23 |
| | GCGTGGGTGGGGTAGAAGAGGACTGGCAGACCTCTC | | |
| CR000312 | TATCACAGGCTCCAGGAAGGGTTTGGCCTCTG------ | 2.47% | −6 |
| | GTGGGGGCGTGGGTGGGGTAGAAGAGGACTGGCAGACCT | | |
| | CTC | | |
| CR000312 | TATCACAGGCTCCAGGAAGGGTTTGGCCTCTG--------- | 2.35% | −9 |
| | GGGGCGTGGGTGGGGTAGAAGAGGACTGGCAGACCTCTC | | |
| CR000312 | TATCACAGGCTCCAGGAAGGGTTTGGCCTCTGATTAGG- | 12.06% | −1 |
| OMePS | TGGGGGCGTGGGTGGGGTAGAAGAGGACTGGCAGACCTC | | |
| | TC | | |
| CR000312 | TATCACAGGCTCCAGGAAGGGTTTGG------------- | 4.75% | −13 |
| OMePS | TGGGGGCGTGGGTGGGGTAGAAGAGGACTGGCAGACCTC | | |
| | TC | | |
| CR000312 | TATCACAGGCTCCAGGAAGGGTTTGGCCTCTGATT-- | 4.32% | −2 |
| OMePS | GGTGGGGGCGTGGGTGGGGTAGAAGAGGACTGGCAGAC | | |
| | CTCTC | | |
| CR000312 | TATCACAGGCTCCAGGAAGGGTTTGGC------------------- | 3.97% | −19 |
| OMePS | GTGGGTGGGGTAGAAGAGGACTGGCAGACCTCTC | | |
| CR000312 | TATCACAGGCTCCAGGAAGGGTTTGG---------------- | 3.28% | −16 |
| OMePS | GGGCGTGGGTGGGGTAGAAGAGGACTGGCAGACCTCTC | | |
| CR000312 | TATCACAGGCTCCAGGAAGGGTTTGGCCTCTGATTAGaGG | 3.25% | 1 |
| OMePS | TGGGGGCGTGGGTGGGGTAGAAGAGGACTGGCAGACCTC | | |
| | TC | | |
| CR000312 | TATCACAGGCTCCAGGAAGGGTTTGGCCTCTGATTAG-- | 1.91% | −2 |
| OMePS | TGGGGGCGTGGGTGGGGTAGAAGAGGACTGGCAGACCTC | | |
| | TC | | |
| CR000312 | TATCACAGGCTCCAGGAAGGGTTTGGCCTCTGATTAG-- | 6.69% | −2 |
| sg | TGGGGGCGTGGGTGGGGTAGAAGAGGACTGGCAGACCTC | | |
| | TC | | |
| CR000312 | TATCACAGGCTCCAGGAAGGGTTTGGCCTCTGATTAGG- | 6.28% | −1 |
| sg | TGGGGGCGTGGGTGGGGTAGAAGAGGACTGGCAGACCTC | | |
| | TC | | |
| CR000312 | TATCACAGGCTCCAGGAAGGGTTTGGCCTCTGA-------------- | 4.58% | −29 |
| sg | ---------------AGGACTGGCAGACCTCTC | | |
| CR000312 | TATCACAGGCTCCAGGAAGGGTTTGGCCTCTGATTAGaGG | 3.83% | 1 |
| sg | TGGGGGCGTGGGTGGGGTAGAAGAGGACTGGCAGACCTC | | |
| | TC | | |
| CR000312 | TATCACAGGCTCCAGGAAGGGTTTGG---------------- | 3.74% | −16 |
| sg | GGGCGTGGGTGGGGTAGAAGAGGACTGGCAGACCTCTC | | |
| CR000312 | TATCACAGGCTCCAGGAAGGGTTTGGCCTCTG--------- | 3.66% | −9 |
| sg | GGGGCGTGGGTGGGGTAGAAGAGGACTGGCAGACCTCTC | | |
| CR000312 | TATCACAGGCTCCAGGAAGGGTTTGGCCTCTGATTAGGG- | 3.19% | −6 |
| sg | -----CGTGGGTGGGGTAGAAGAGGACTGGCAGACCTCTC | | |
| CR000312 | TATCACAGGCTCCAGGAAGGGTTTGG------------- | 3.18% | −13 |
| sg | TGGGGGCGTGGGTGGGGTAGAAGAGGACTGGCAGACCTC | | |
| | TC | | |
| CR000312 | TATCACAGGCTCCAGGAAGGGTTTGGCCTCTGATTAGG- | 12.59% | −1 |
| sg OMePS | TGGGGGCGTGGGTGGGGTAGAAGAGGACTGGCAGACCTC | | |
| | TC | | |
| CR000312 | TATCACAGGCTCCAGGAAGGGTTTGGCCTCTGATT-- | 7.73% | −2 |
| sg OMePS | GGTGGGGGCGTGGGTGGGGTAGAAGAGGACTGGCAGAC | | |
| | CTCTC | | |
| CR000312 | TATCACAGGCTCCAGGAAGGGTTTGGCCTCTG--------- | 6.49% | −9 |
| sg OMePS | GGGGCGTGGGTGGGGTAGAAGAGGACTGGCAGACCTCTC | | |
| CR000312 | TATCACAGGCTCCAGGAAGGGTTTGG---------------- | 5.32% | −16 |
| sg OMePS | GGGCGTGGGTGGGGTAGAAGAGGACTGGCAGACCTCTC | | |
| CR000312 | TATCACAGGCTCCAGGAAGGGTTTGGC------------------- | 3.89% | −19 |
| sg OMePS | GTGGGTGGGGTAGAAGAGGACTGGCAGACCTCTC | | |
| CR000312 | TATCACAGGCTCCAGGAAGGG---------------------- | 2.50% | −22 |
| sg OMePS | GGCGTGGGTGGGGTAGAAGAGGACTGGCAGACCTCTC | | |
| CR000312 | TATCACAGGCTCCAGGAAGGGTTTGG------------- | 2.50% | −13 |
| sg OMePS | TGGGGGCGTGGGTGGGGTAGAAGAGGACTGGCAGACCTC | | |
| | TC | | |
| CR000312 | TATCACAGGCTCCAGGAAGGGTTTGGCCTCTGATTAG-- | 2.25% | −2 |
| sg OMePS | TGGGGGCGTGGGTGGGGTAGAAGAGGACTGGCAGACCTC | | |
| | TC | | |
| CR003085 | ATGTAAGGAGGATGAGCCACATGGTATGGGAGG---------- | 12.51% | −10 |
| | ACTCTAGGGTCAGAGAAATATGGGTTATATCCTTCTA | | |
| CR003085 | ATGTAAGGAGGATGAGCCACATGGTATGGGAGGTAT- | 8.89% | −1 |
| | CTAAGGACTCTAGGGTCAGAGAAATATGGGTTATATCCTT | | |
| | CTA | | |
| CR003085 | ATGTAAGGAGGATGAGCCACATGGTATGGGAGGTATAaC | 7.30% | 1 |
| | TAAGGACTCTAGGGTCAGAGAAATATGGGTTATATCCTTC | | |
| | TA | | |
| CR003085 | ATGTAAGGAGGATGAGCCACATGGTATGGGA------------- | 6.20% | −13 |
| | CTCTAGGGTCAGAGAAATATGGGTTATATCCTTCTA | | |
| CR003085 | ATGTAAGGAGGATGAGCCACATGGTA-------------- | 3.50% | −14 |
| | AGGACTCTAGGGTCAGAGAAATATGGGTTATATCCTTCTA | | |
| CR003085 | ATGTAAGGAGGATGAGCCACATGGTATGGGAGGTA----- | 3.09% | −5 |
| | AGGACTCTAGGGTCAGAGAAATATGGGTTATATCCTTCTA | | |
| CR003085 | ATGTAAGGAGGATGAGCCACATGGTATGGGAGGTATA--- | 2.29% | −3 |
| | AGGACTCTAGGGTCAGAGAAATATGGGTTATATCCTTCTA | | |
| CR003085 | ATGTAAGGAGGATGAGCCACATGGTATGGGAGGTATA- | 1.64% | −1 |
| | TAAGGACTCTAGGGTCAGAGAAATATGGGTTATATCCTTC | | |
| | TA | | |
| CR003085 | ATGTAAGGAGGATGAGCCACATGGTATGG--------- | 1.43% | −9 |
| | TAAGGACTCTAGGGTCAGAGAAATATGGGTTATATCCTTC | | |
| | TA | | |
| CR003085 | ATGTAAGGAGGATGAGCCACATGGTATGGGAGGTATA-- | 1.39% | −2 |
| | AAGGACTCTAGGGTCAGAGAAATATGGGTTATATCCTTCTA | | |
| CR003085 | ATGTAAGGAGGATGAGCCACATGGTATGGGAGGTATAaC | 13.65% | 1 |
| OMePS sg | TAAGGACTCTAGGGTCAGAGAAATATGGGTTATATCCTTC | | |
| | TA | | |
| CR003085 | ATGTAAGGAGGATGAGCCACATGGTATGGGAGG---------- | 10.96% | −10 |
| OMePS sg | ACTCTAGGGTCAGAGAAATATGGGTTATATCCTTCTA | | |
| CR003085 | ATGTAAGGAGGATGAGCCACATGGTATGGGA------------- | 8.21% | −13 |
| OMePS sg | CTCTAGGGTCAGAGAAATATGGGTTATATCCTTCTA | | |
| CR003085 | ATGTAAGGAGGATGAGCCACATGGTATGGGAGGTAT- | 8.15% | −1 |
| OMePS sg | CTAAGGACTCTAGGGTCAGAGAAATATGGGTTATATCCTT | | |
| | CTA | | |
| CR003085 | ATGTAAGGAGGATGAGCCACATGGTA-------------- | 6.29% | −14 |
| OMePS sg | AGGACTCTAGGGTCAGAGAAATATGGGTTATATCCTTCTA | | |
| CR003085 | ATGTAAGGAGGATGAGCCACATGGTATGGGAGGTA----- | 4.53% | −5 |
| OMePS sg | AGGACTCTAGGGTCAGAGAAATATGGGTTATATCCTTCTA | | |
| CR003085 | ATGTAAGGAGGATGAGCCACATGGTATGGGAGGTATA--- | 3.60% | −3 |
| OMePS sg | AGGACTCTAGGGTCAGAGAAATATGGGTTATATCCTTCTA | | |
| CR003085 | ATGTAAGGAGGATGAGCCACATGGTATGGGAGGTA-- | 3.47% | −2 |
| OMePS sg | CTAAGGACTCTAGGGTCAGAGAAATATGGGTTATATCCTT | | |
| | CTA | | |
| CR003085 | ATGTAAGGAGGATGAGCCACATGGTATGGGAGGTATA- | 1.30% | −1 |
| OMePS sg | TAAGGACTCTAGGGTCAGAGAAATATGGGTTATATCCTTC | | |
| | TA | | |
| CR003085 | ATGTAAGGAGGATGAGCCACATGGTATGGG------------------- | 1.00% | −37 |
| OMePS sg | ------------------TTATATCCTTCTA | | |
| CR003085 | ATGTAAGGAGGATGAGCCACATGGTATGGGAGGTATAaC | 10.09% | 1 |
| OMePS | TAAGGACTCTAGGGTCAGAGAAATATGGGTTATATCCTTC | | |
| | TA | | |
| CR003085 | ATGTAAGGAGGATGAGCCACATGGTATGGGAGG---------- | 9.05% | −10 |
| OMePS | ACTCTAGGGTCAGAGAAATATGGGTTATATCCTTCTA | | |
| CR003085 | ATGTAAGGAGGATGAGCCACATGGTATGGGAGGTAT- | 6.52% | −1 |
| OMePS | CTAAGGACTCTAGGGTCAGAGAAATATGGGTTATATCCTT | | |
| | CTA | | |
| CR003085 | ATGTAAGGAGGATGAGCCACATGGTATGGGA------------- | 4.94% | −13 |
| OMePS | CTCTAGGGTCAGAGAAATATGGGTTATATCCTTCTA | | |
| CR003085 | ATGTAAGGAGGATGAGCCACATGGTA-------------- | 4.55% | −14 |
| OMePS | AGGACTCTAGGGTCAGAGAAATATGGGTTATATCCTTCTA | | |
| CR003085 | ATGTAAGGAGGATGAGCCACATGGTATGGGAGGTA----- | 2.40% | −5 |
| OMePS | AGGACTCTAGGGTCAGAGAAATATGGGTTATATCCTTCTA | | |
| CR003085 | ATGTAAGGAGGATGAGCCACATGGTATGGGAGGTA-- | 2.00% | −2 |
| OMePS | CTAAGGACTCTAGGGTCAGAGAAATATGGGTTATATCCTT | | |
| | CTA | | |
| CR003085 | ATGTAAGGAGGATGAGCCACATGGTATGGGAGGTATA--- | 1.82% | −3 |
| OMePS | AGGACTCTAGGGTCAGAGAAATATGGGTTATATCCTTCTA | | |
| CR003085 | ATGTAAGGAGGATGAGCCACATGGTATGGGAGGTATA- | 1.57% | −1 |
| OMePS | TAAGGACTCTAGGGTCAGAGAAATATGGGTTATATCCTTC | | |
| | TA | | |
| CR003085 | ATGTAAGGAGGATGAGCCACATGGTATGGGAGGT---------- | 1.16% | −34 |
| OMePS | ------------------------TATATCCTTCTA | | |
| CR003085 | ATGTAAGGAGGATGAGCCACATGGTATGGGAGG---------- | 15.06% | −10 |
| PS | ACTCTAGGGTCAGAGAAATATGGGTTATATCCTTCTA | | |
| CR003085 | ATGTAAGGAGGATGAGCCACATGGTATGGGAGGTAT- | 11.15% | −1 |
| PS | CTAAGGACTCTAGGGTCAGAGAAATATGGGTTATATCCTT | | |
| | CTA | | |
| CR003085 | ATGTAAGGAGGATGAGCCACATGGTATGGGAGGTATAaC | 8.37% | 1 |
| PS | TAAGGACTCTAGGGTCAGAGAAATATGGGTTATATCCTTC | | |
| | TA | | |
| CR003085 | ATGTAAGGAGGATGAGCCACATGGTATGGGA------------- | 7.44% | −13 |
| PS | CTCTAGGGTCAGAGAAATATGGGTTATATCCTTCTA | | |
| CR003085 | ATGTAAGGAGGATGAGCCACATGGTA-------------- | 5.33% | −14 |
| PS | AGGACTCTAGGGTCAGAGAAATATGGGTTATATCCTTCTA | | |
| CR003085 | ATGTAAGGAGGATGAGCCACATGGTATGGGAGGTA----- | 3.58% | −5 |
| PS | AGGACTCTAGGGTCAGAGAAATATGGGTTATATCCTTCTA | | |
| CR003085 | ATGTAAGGAGGATGAGCCACATGGTATGGGAGGTATA--- | 3.50% | −3 |
| PS | AGGACTCTAGGGTCAGAGAAATATGGGTTATATCCTTCTA | | |
| CR003085 | ATGTAAGGAGGATGAGCCACATGGTATGGGAGGTA-- | 2.05% | −2 |
| PS | CTAAGGACTCTAGGGTCAGAGAAATATGGGTTATATCCTT | | |
| | CTA | | |
| CR003085 | ATGTAAGGAGGATGAGCCACATGGTATGG-------------- | 1.39% | −14 |
| PS | ACTCTAGGGTCAGAGAAATATGGGTTATATCCTTCTA | | |
| CR003085 | ATGTAAGGAGGATGAGCCACATGGTATGGGAGGTATA- | 0.86% | −1 |
| PS | TAAGGACTCTAGGGTCAGAGAAATATGGGTTATATCCTTC | | |
| | TA | | |
| CR003085 | ATGTAAGGAGGATGAGCCACATGGTATGGGAGGTAT- | 12.62% | −1 |
| PS sg | CTAAGGACTCTAGGGTCAGAGAAATATGGGTTATATCCTT | | |
| | CTA | | |
| CR003085 | ATGTAAGGAGGATGAGCCACATGGTATGGGAGGTATAaC | 11.73% | 1 |
| PS sg | TAAGGACTCTAGGGTCAGAGAAATATGGGTTATATCCTTC | | |
| | TA | | |
| CR003085 | ATGTAAGGAGGATGAGCCACATGGTATGGGAGG---------- | 8.86% | −10 |
| PS sg | ACTCTAGGGTCAGAGAAATATGGGTTATATCCTTCTA | | |
| CR003085 | ATGTAAGGAGGATGAGCCACATGGTATGGGA------------- | 6.59% | −13 |
| PS sg | CTCTAGGGTCAGAGAAATATGGGTTATATCCTTCTA | | |
| CR003085 | ATGTAAGGAGGATGAGCCACATGGTA------------- | 4.88% | −14 |
| PS sg | AGGACTCTAGGGTCAGAGAAATATGGGTTATATCCTTCTA | | |
| CR003085 | ATGTAAGGAGGATGAGCCACATGGTATGGGAGGTATA--- | 3.68% | −3 |
| PS sg | AGGACTCTAGGGTCAGAGAAATATGGGTTATATCCTTCTA | | |
| CR003085 | ATGTAAGGAGGATGAGCCACATGGTATGGGAGGTA-- | 3.62% | −2 |
| PS sg | CTAAGGACTCTAGGGTCAGAGAAATATGGGTTATATCCTT | | |
| | CTA | | |
| CR003085 | ATGTAAGGAGGATGAGCCACATGGTATGGGAGGTATA- | 3.48% | −1 |
| PS sg | TAAGGACTCTAGGGTCAGAGAAATATGGGTTATATCCTTC | | |
| | TA | | |
| CR003085 | ATGTAAGGAGGATGAGCCACATGGTATGGGAGGTA----- | 2.90% | −5 |
| PS sg | AGGACTCTAGGGTCAGAGAAATATGGGTTATATCCTTCTA | | |
| CR003085 | ATGTAAGGAGGATGAGCCACATGGTAT------------ | 1.10% | −12 |
| PS sg | AAGGACTCTAGGGTCAGAGAAATATGGGTTATATCCTTCTA | | |
| CR003085 | ATGTAAGGAGGATGAGCCACATGGTATGGGAGG---------- | 11.79% | −10 |
| sg | ACTCTAGGGTCAGAGAAATATGGGTTATATCCTTCTA | | |
| CR003085 | ATGTAAGGAGGATGAGCCACATGGTATGGGAGGTAT- | 9.21% | −1 |
| sg | CTAAGGACTCTAGGGTCAGAGAAATATGGGTTATATCCTT | | |
| | CTA | | |
| CR003085 | ATGTAAGGAGGATGAGCCACATGGTATGGGAGGTATAaC | 6.84% | 1 |
| sg | TAAGGACTCTAGGGTCAGAGAAATATGGGTTATATCCTTC | | |
| | TA | | |
| CR003085 | ATGTAAGGAGGATGAGCCACATGGTATGGGA------------- | 6.44% | −13 |
| sg | CTCTAGGGTCAGAGAAATATGGGTTATATCCTTCTA | | |
| CR003085 | ATGTAAGGAGGATGAGCCACATGGTA-------------- | 4.12% | −14 |
| sg | AGGACTCTAGGGTCAGAGAAATATGGGTTATATCCTTCTA | | |
| CR003085 | ATGTAAGGAGGATGAGCCACATGGTATGGGAGGTA----- | 3.46% | −5 |
| sg | AGGACTCTAGGGTCAGAGAAATATGGGTTATATCCTTCTA | | |
| CR003085 | ATGTAAGGAGGATGAGCCACATGGTATGGGAGGTATA--- | 3.22% | −3 |
| sg | AGGACTCTAGGGTCAGAGAAATATGGGTTATATCCTTCTA | | |
| CR003085 | ATGTAAGGAGGATGAGCCACATGGTATGGGAGGTA-- | 1.65% | −2 |
| sg | CTAAGGACTCTAGGGTCAGAGAAATATGGGTTATATCCTT | | |
| | CTA | | |
| CR003085 | ATGTAAGGAGGATGAGCCACATGGTATGGGAGGTATA- | 1.07% | −1 |
| sg | TAAGGACTCTAGGGTCAGAGAAATATGGGTTATATCCTTC | | |
| | TA | | |
| CR003085 | ATGTAAGGAGGATGAGCCACATGGTATGG-------------- | 0.95% | −14 |
| sg | ACTCTAGGGTCAGAGAAATATGGGTTATATCCTTCTA | | |

[0825] The genome edited and unedited HSPC were analyzed for proliferation and HbF upregulation in a three-stage erythroid differentiation cell culture protocol. The genome edited and unedited HSPC were analyzed by flow cytometry for expression levels of fetal globin and at day 7 for two erythroid cell surface markers, transferrin receptor (CD71) and glycophorin A (CD235a) using antibodies conjugated to fluorescent dyes. The live cells were identified and gated by exclusion of Live/Dead Fixable Dead Cell Stain. Genome editing with the included HPFH region targeting and BCL11A erythroid enhancer targeting gRNAs did not adversely affect erythroid differentiation as the cultured cells showed percentages of CD71+ cells consistent with erythroblasts similar to unedited cells at day 7 of differentiation, although Protocol 1 and Protocol 2 differed in percentages of CD71+ across conditions (FIG. 44). Cultures treated with the included HPFH region targeting and BCL11A erythroid enhancer targeting gRNAs resulted in similar patterns of relative changes in the percentage of erythroid cells containing HbF compared to mock electroporated cells throughout the 21 day culture period and between the two protocols (FIG. 45, FIG. 46 and FIG. 47). HbF was induced in cells exposed of RNPs and maintained in either Protocol 1 or Protocol 2, however, the percentage of cells that were HbF positive tended to be lower across conditions and timepoints with Protocol 2 (FIG. 45, FIG. 46 and FIG. 47). Induction of HbF was most pronounced with gRNAs consisting of target domains CR001030, CR00312 and CR001128, particularly at the later timepoints (FIG. 45, FIG. 46 and FIG. 47). Across targeting domains, sgRNAs trended to higher induction of HbF than dgRNAs, particularly OMePS modified sgRNAs (FIG. 45, FIG. 46 and FIG. 47). Relatively low induction of HbF with targeting domain CR001137 may be explained by the lower level of editing at this target site (FIG. 43, FIG. 45-FIG. 47). Induction of HbF positive cells by dgRNA including the targeting domain of g8 targeting exon 2 of BCL11A was also observed in parallel (FIG. 45-FIG. 47). An increase in HbF-containing erythrocytes derived from genome edited cells is likely to have therapeutic implications by reduced sickling. Edited cells were capable of proliferating in erythroid differentiation conditions (9 to 53-fold at day 7 and 36 to 143-fold at day 21, FIG. 48), however, in some cases, proliferation was suppressed relative to unedited control cells (14-83% of unedited control at day 7 and 18-95% of unedited control at day 21) (FIG. 48). Lowest proliferation was observed with the cells edited by dgRNA including the targeting domain of g8 targeting exon 2 of BCL11A (30% of unedited control at day 7 and 18% of unedited control at day 21) and with many of the OMePS modified sgRNAs (FIG. 48).

### Example 5 Excision Using Two gRNAs to the HPFH Region

[0826] Primary human CD34+ HSPCs were electroporated with RNP containing two different gRNA molecules to different sites within the HPFH region. For each RNP, dgRNA molecules as described above, were used. Briefly, RNP comprising a dgRNA targeting a first site within the French HPFH region and RNP comprising a dgRNA targeting a second site within the French HPFH region were combined, and electroporated into CD34+ HSPCs in the following ratios: 0.5× first dgRNA RNP+0.5× second dgRNA RNP; 1.0×g2 dgRNA (“g2”=positive control comprising a targeting domain of CR000088, which targets a coding sequence of the BCL11a gene); no RNPs (“control”). Cells were cultured as described above, and differentiated into erythrocytes using the protocol described above (see FIG. 17). Fetal hemoglobin expression was assessed. The results are shown in FIG. 27 and Table 25. Without being bound by theory, it is believed that simultaneous introduction of RNPs comprising gRNA molecules to two target sequences will cause the deletion (i.e., excision) of the DNA between the two cut sites (e.g., all or most of the DNA between the two cut sites), including any regulatory or coding sequences contained within that region. These results show that RNPs targeting two separate regions within the HPFH region could be delivered simultaneously to CD34+ HSPCs by electroporation and induce fetal hemoglobin expression in edited cells differentiated into erythrocytes.

TABLE 25

| Guide RNA targeting | |
|---|---|
| domain ID 1/Guide RNA | % HbF+ (F cells), average |
| targeting domain ID 2 | of replicates |
| CR001016/CR001021 | 50.9 |
| CR001021/CR001034 | 53.4 |
| CR001034/CR001037 | 56.1 |
| CR001037/CR001045 | 50.6 |
| CR001045/CR001058 | 45.2 |
| CR001058/CR001065 | 42.6 |
| CR001065/CR001075 | 43.3 |
| CR001075/CR001086 | 40.4 |
| CR001086/CR001096 | 39.3 |
| CR001096/CR001107 | 41.6 |
| CR001107/CR001135 | 45.6 |
| CR001143/CR001151 | 40.1 |
| CR001151/CR001159 | 40.9 |
| CR001159/CR001166 | 42.0 |
| CR001166/CR001173 | 44.8 |
| CR001173/CR001179 | 43.1 |
| CR001179/CR001191 | 41.9 |
| CR001191/CR001199 | 42.7 |
| CR001199/CR001212 | 48.3 |
| CR001212/CR001227 | 45.6 |
| CR001016/CR001034 | 53.4 |
| CR001034/CR001045 | 50.0 |
| CR001045/CR001065 | 44.2 |
| CR001065/CR001086 | 39.1 |
| CR001086/CR001107 | 43.4 |
| CR001107/CR001143 | 44.8 |
| CR001143/CR001159 | 45.0 |
| CR001159/CR001173 | 46.6 |
| CR001173/CR001191 | 44.8 |
| CR001191/CR001212 | 51.7 |
| CR001021/CR001037 | 56.9 |
| CR001037/CR001058 | 48.0 |
| CR001058/CR001075 | 41.7 |
| CR001075/CR001096 | 41.5 |
| CR001096/CR001135 | 44.3 |
| CR001135/CR001151 | 42.9 |
| CR001151/CR001166 | 41.9 |
| CR001166/CR001179 | 40.4 |
| CR001179/CR001199 | 38.5 |
| CR001199/CR001227 | 40.0 |
| g2 | 54.0 |
| ctrl | 34.5 |

### Example 6. Potential Off-Target Editing Assessment of gRNAs Targeting the BCL11a Enhancer

[0827] An oligo insertion based assay (See, e.g., Tsai et al., Nature Biotechnology. 33, 187-197; 2015) was used to determine potential off-target genomic sites cleaved by Cas9 targeting the BCL11a enhancer.

[0828] A total of 28 guides (dual guide RNAs comprising the indicated targeting domain) targeting the BCL11a enhancer and 10 gRNAs targeting the HPFH region were screened in the Cas9-expressing HEK293 cells described above, and the results are plotted in FIG. 33 (BCL11a enhancer) and FIG. 49 (HPFH). With respect to the gRNAs targeting the BCL11a enhancer, the assay identified potential off-target sites for some guides, however targeted deep sequencing was used to determine whether the potential sites were bona fide off-target sites cleaved by Cas9. Using primers that flanked the potential off-target sites, isolated genomic DNA was amplified and the amplicons were sequenced. If the potential off-target site was cleaved by Cas9, indels should be detected at the site. From these follow-on interrogations of the potential off-target sites, no indels were detected at the potential off-target sites for at least three of the guide RNAs: CR000311, CR000312, CR001128. With respect to the gRNAs targeting the BCL11a enhancer, the assay did not identify any potential off-target sites for at least gRNAs CR001137, CR001212, and CR001221. Targeted deep sequencing will be performed to determine whether the potential off target sites identified for the other gRNA molecules are bona-fide off target sites cleaved by Cas9.

### Example 7: Evaluation of Cas9 Variants

### Evaluation in CD34+ Hematopoietic Stem Cells

[0829] We evaluated 14 purified Streptococcus pyogenes Cas9 (SPyCas9) proteins by measuring their efficiency of knocking out the beta-2-microglobulin (B2M) gene in primary human hematopoietic stem cells (HSCs). These proteins were divided into 3 groups: the first group consisted of SPyCas9 variants with improved selectivity (Slaymaker et al. 2015, Science 351: 84 (e1.0, e1.1 and K855A); Kleinstiver et al. 2016, Nature 529: 490 (HF)). The second group consisted of wild type SPyCas9 with different numbers and/or positions of the SV40 nuclear localization signal (NLS) and the 6×Histidine (His6) or 8×Histidine (His8) tag with or without a cleavable 1EV site, and a SPyCas9 protein with two cysteine substitutions (C80L, C574E), which have been reported to stabilize Cas9 for structural studies (Nishimasu et al. 2014, Cell 156:935). The third group consisted of the same recombinant SPyCas9 produced by different processes (FIG. 60). B2M knockout was determined by FACS and next generation sequencing (NGS).

### Methods

### Materials

[0830] 1. Neon electroporation instrument (Invitrogen, MPK5000)
[0831] 2. Neon electroporation kit (Invitrogen, MPK1025)
[0832] 3. crRNA (targeting domain sequence of GGCCACGGAGCGAGACAUCU, complementary to a sequence in the B2M gene, fused to SEQ ID NO: 6607)
[0833] 4. tracrRNA (SEQ ID NO: 6660)
[0834] 5. Cas9 storage buffer: 20 mM Tris-Cl, pH 8.0, 200 mM KCl, 10 mM MgCl₂
[0835] 6. Bone marrow derived CD34+ HSCs (Lonza, 2M-101C)
[0836] 7. Cell culture media (Stemcell Technologies, StemSpam SFEM II with StemSpam CC-100)
[0837] 8. FACS wash buffer: 2% FCS in PBS
[0838] 9. FACS block buffer: per mL PBS, add 0.5 ug mouse IgG, 150 ug Fc block, 20 uL FCS
[0839] 10. Chelex suspension: 10% Chelex 100 (bioRad, Cat#142-1253) in H₂O
[0840] 11. Anti-B2M antibody: Biolegend, cat#316304

### Process

[0841] Thaw and grow the cells following Lonza's recommendations, add media every 2-3 days. On day 5, pellet the cells at 200×g for 15 min, wash once with PBS, resuspend the cells with T-buffer from NEON kit at 2×10⁴/uL, put on ice. Dilute Cas 9 protein with Cas9 storage buffer to 5 mg/ml. Reconstitute crRNA and tracrRNA to 100 uM with H₂O. The ribonucleoprotein (RNP) complex is made by mixing 0.8 uL each of CAS 9 protein, crRNA and tracrRNA with 0.6 uL of Cas9 storage buffer, incubate at room temperature for 10 min. Mix 7 uL of HSCs with RNP complex for two minutes and transfer the entire 10 uL into a Neon pipette tip, electroporate at 1700v, 20 ms and 1 pulse. After electroporation, immediately transfer cells into a well of 24-well plate containing 1 ml media pre-calibrated at 37° C., 5% CO₂. Harvest cells 72 hrs post-electroporation for FACS and NGS analysis.

[0842] FACS: take 250 uL of the cells from each well of 24-well plate, to wells of 96-well U-bottom plate and pellet the cells. Wash once with 2% FCS (fetal calf serum)-PBS. Add 50 uL FACS block buffer to the cells and incubate on ice for 10 minutes, add 1 uL FITC labeled B2M antibody and incubate for 30 minutes. Wash with 150 uL FACS wash buffer once followed by once more with 200 uL FACS wash buffer once. Cells were resuspended in 200 uL FACS buffer FACS analysis.

[0843] NGS sample prep: transfer 250 uL of cell suspension from each well of the 24-well plate to a 1.5 ml Eppendorf tube, add 1 mL PBS and pellet the cells. Add 100 uL of Chelex suspension, incubate at 99° C. for 8 minutes and vortex 10 seconds followed by incubating at 99° C. for 8 minutes, vortex 10 seconds. Pellet down the resin by centrifuging at 10,000×g for 3 minutes and the supernatant lysate is used for PCR. Take 4 uL lysate and do PCR reaction with the b2m primers (b2mg67F: CAGACAGCAAACTCACCCAGT, b2mg67R: CTGACGCTTATCGACGCCCT) using Titanium kit (Clonetech, cat#639208) and follow the manufacturer's instruction. The following PCR conditions are used: 5 minutes at 98° C. for 1 cycle; 15 seconds at 95° C., 15 seconds at 62° C., and 1 minute at 72° C. for 30 cycles; and finally 3 minutes at 72° C. for 1 cycle. The PCR product was used for NGS.

[0844] Statistics: The percentage of B2M KO cells by FACS and the percentage of indels by NGS are used to evaluate the CAS 9 cleavage efficiency. The experiment was designed with Cas9 as fixed effect. Each experiment is nested within donors, as nested random effects. Therefore, the mixed linear model was applied for the analysis of FACS and NGS data.

### Results

[0845] In order to normalize the experimental and donor variations, we graphed the relative activity of each protein to iProt105026, the original design with two SV40 NLS flanking the wild type SPyCas9 and the His6 tag at the C-terminal of the protein (FIG. 34). The statistical analysis shows that compared with the reference Cas9 protein iProt105026, iProt106331, iProt106518, iProt106520 and iProt106521 are not significantly different in knocking out B2M in HSCs, while the other variants tested (PID426303, iProt106519, iProt106522, iProt106545, iProt106658, iProt106745, iProt106746, iProt106747, iProt106884) are highly significantly different from the reference iProt105026 in knocking out B2M in HSCs. We found that moving the His6 tag from the C-terminal to N-terminal (iProt106520) did not affect the activity of the protein (FIG. 34). One NLS was sufficient to maintain activity only when it was placed at the C-terminal of the protein (iProt106521 vs. iProt106522, FIG. 34). Proteins purified from process 1 had consistent higher knockout efficiency than those from processes 2 and 3 (iProt106331 vs. iProt106545 & PID426303, FIG. 34). In general, the SPyCas9 variants with a reported improved selectivity were not as active as the wild type SPyCas9 (iProt106745, iProt106746 and iProt106747, FIG. 34). Interestingly iProt106884 did not cut the targeting site. This is consistent with the report by Kleinstiver et al that this variant failed to cut up to 20% of the legitimate targeting sites in mammalian cells (Kleinstiver et al. 2016, Nature 529: 490). Finally, the Cas9 variant with two cysteine substitutions (iProt106518) maintained high levels of enzymatic activity (FIG. 34).

[0846] Next, editing efficiency of RNPs comprising different Cas9 variants were tested with either modified or unmodified gRNAs targeting the +58 enhancer region. sgRNA molecules comprising the targeting domains of cr00312 and cr1128 were tested in either unmodified (CR00312=SEQ ID NO: 342; CR001128=SEQ ID NO: 347) or modified (OMePS CR00312=SEQ ID NO: 1762; OMePS CR001128=SEQ ID NO: 1763), and were precomplexed with Cas9 variants shown in Table 35.

TABLE 35
Cas9 variants tested for biological function with +58 enhancer region-
targeting gRNA molecules.

| iProt Code | Construct |
|---|---|
| iProt106518 | NLS-Cas9(C80L/C574E)-NLS-His6 |
| iProt106331 | NLS-Cas9-NLS-His6 |
| iProt106745 | NLS-Cas9(K855A)-NLS-His6 |
| iProt106884 | NLS-Cas9(HF)-NLS-His6 |

[0847] RNP formed as described above were delivered to HSPC cells as described above, and the cells assessed for % editing (by NGS) and % HbF induction upon erythroid differentiation, as described in these Examples. The results are shown in FIG. 42A (% editing) and FIG. 42B (HbF induction). The results show that varying the Cas9 component between those variants tested did not alter the gene editing efficiency of both unmodified and modified versions of sgRNA CR00312 and CR001128, nor did the Cas9 variants impact the ability of the erythroid-differentiated gene edited cells to produce HbF.

### Example 8: Ex Vivo Expansion of Gene Edited HSPCs, and Editing Analysis in HSPC Subsets

### Expansion of Cells Prior to Gene-Editing

[0848] Human bone marrow CD34⁺ cells were purchased from either AllCells (Cat#: ABM017F) or Lonza (Cat#: 2M-101C) and expanded for 2 to 3 days using StemSpan SFEM (StemCell Technologies; Cat no. 09650) supplemented with 50 ng/mL of thrombopoietin (Tpo, Peprotech; Cat#300-18), 50 ng/mL of human Flt3 ligand (Flt-3L, Peprotech; Cat#300-19), 50 ng/mL of human stem cell factor (SCF, Peprotech; Cat#300-07), human interleukin-6 (IL-6, Peprotech; Cat#200-06), 1% L-glutamine; 2% penicillin/streptomycin, and Compound 4 (0.75 μM).

Electroporation of Cas9 and Guide RNA Ribonucleoprotein (RNP) Complexes into Cells

[0849] Cas9-guide RNA ribonucleoprotein complexes (RNPs) were prepared immediately prior to electroporation. For formation of RNP using dual guide RNAs, 3 μg of each of crRNA (in 2.24 μL) and tracrRNA (in 1.25 μL) were first denatured at 95° C. for 2 min in separate tubes and then cooled to room temperature. For preparation of Cas9 protein, 7.3 μg of CAS9 protein (in 1.21 μL) was mixed with 0.52 μL of 5×CCE buffer (20 mM HEPES, 100 mM KCL, 5 mM MgCL2, 5% Glycerol and freshly added 1 mM DTT). TracrRNA was first mixed with the Cas9 preparation and incubated at 37° C. for 5 min. The CrRNA was then added to TracrRNA/CAS9 complexes and incubated for 5 min at 37° C. The HSPC were collected by centrifugation at 200×g for 15 min and resuspended in T buffer affiliated with the Neon electroporation kit (Invitrogen; Cat#: MPK1096) at a cell density of 2×10⁷/mL. RNP was mixed with 12 μL of cells by pipetting up and down 3 times gently. To prepare single guide RNA (sgRNA) and Cas9 complexes, 2.25 μg sgRNA (in 1.5 μL) was mixed with 2.25 μg Cas9 protein (in 3 μL) and incubated at RT for 5 min. The sgRNA/Cas9 complex was then mixed with 10.5 μL of 2×10⁷/mL cells by pipetting up and down several times gently and incubated at RT for 2 min. The RNP/cell mixture (10 μL) was transferred into a Neon electroporation probe. Electroporation was performed with Neon transfection system (Invitrogen; MPK5000S) using 1700 volts/20 milliseconds and 1 pulse.

Expansion of Cells after Gene-Editing

[0850] After electroporation, the cells were transferred into 0.5 mL pre-warmed StemSpan SFEM medium supplemented with growth factors, cytokines and Compound 4 as described above and cultured at 37° C. for 3 days. After a total of 10 days of cell expansion, 3 days before electroporation and 7 days after electroporation, the total cell number increased 2-7 fold relative to the starting cell number (FIG. 35).

### Genomic DNA Preparation

[0851] Genomic DNA was prepared from edited and unedited HSPC at 48 hours post-electroporation. Cells were lysed in 10 mM Tris-HCL, pH 8.0; 0.05% SDS and freshly added Protease K of 25 μg/mL and incubated at 37° C. for 1 hour followed by additional incubation at 85° C. for 15 min to inactivate protease K.

### T7E1 Assay

[0852] To determine editing efficiency of HSPCs, T7E1 assay was performed. PCR was performed using Phusion Hot Start II High-Fidelity kit (Thermo Scientific; Cat#: F-549L) with the following cycling condition: 98° C. for 30″; 35 cycles of 98° C. for 5″, 68° C. for 20′, 72° C. for 30″; 72° C. for 5 min. The following primers were used: forward primer: 5′-AGCTCCAAACTCTCAAACCACAGGG-3′ and reverse primer: 5′-TACAATTTTGGGAGTCCACACGGCA-3′. PCR products were denatured and re-annealed using the following condition: 95° C. for 5 min, 95-85° C. at −2° C./s, 85-25° C. at −0.1° C./s, 4° C. hold. After annealing, 1 μL of mismatch-sensitive T7 E1 nuclease (NEB, Cat# M0302L) was added into 10 μL of PCR product above and further incubated at 37° C. for 15 min for digestion of hetero duplexes, and the resulting DNA fragments were analyzed by agarose gel (2%) electrophoresis. Editing efficiency was quantified using ImageJ software (http://rsb.info.nih.gov/ij/).

### PCR Preparation for Next Generation Sequencing (NGS)

[0853] To determine editing efficiency more precisely and patterns of insertions and deletions (indels), the PCR products were subjected to next generation sequencing (NGS). The PCR were performed in duplicate using Titanium Taq PCR kit (Clontech Laboratories; Cat#: 639210) with the following cycling condition: 98° C. for 5 min; 30 cycles of 95° C. for 15 seconds, 68° C. for 15 seconds, 72° C. 1 min; 72° C. for 7 min. The following primers were used: forward primer: 5′-AGCTCCAAACTCTCAAACCACAGGG-3′ and reverse primer: 5′-TACAATTTTGGGAGTCCACACGGCA-3′. The PCR products were analyzed by 2% agarose gel electrophoresis and submitted for deep sequencing.

### Flow Cytometry Analysis of Editing Efficiency in Hematopoietic Stem and Progenitor Subpopulations.

[0854] Cells were subjected to flow cytometry to characterize editing efficiency in stem and progenitor cell (HSPC) subpopulations. The frequencies of HSPC subsets, including CD34+ cells, CD34+CD90+ cells, CD34+CD90+CD45RA− cells, and CD34+CD9O+CD45RA−CD49f+ cells, prior to (48 hours in culture) and after genome editing (10 days in culture; 3 days after genome editing) was determined from sampling aliquots of cell cultures (FIG. 36, FIG. 37, FIG. 38). Cells were incubated with anti-CD34 (BD Biosciences, Cat#555824), anti-CD38 (BD Biosciences, Cat#560677), anti-CD90 (BD Biosciences, Cat#555596), anti-CD45RA (BD Biosciences, Cat#563963), anti-CD49f (BD Biosciences, Cat#562582) in modified FACS buffer, containing PBS supplemented with 0.5% BSA, 2 mM EDTA pH7.4, at 4° C., in dark for 30 min. Cell viability was determined by 7AAD. Cells were washed with modified FACS buffer and multicolor FACS analysis was performed on a Fortessa (BD Biosciences). Flow cytometry results were analyzed using Flowjo software. Genome edited cells grown in the presence of Compound 4 (alone) exhibited detectible levels of all HSPC subsets assessed, including CD34+, CD34+CD90+, CD34+CD9O+CD45RA−, and CD34+CD9O+CD45RA−CD49f+ subsets, indicating that long-term HSC populations persist in cell culture in the presence of Compound 4 (alone) after genome editing (FIG. 38).

[0855] Four hours after gene editing, aliquots of cell cultures were sampled and cells were sorted into HSPC subsets (CD34+, CD34+CD38+, CD34+CD38−, CD34+CD38−CD45RA−, CD34+CD38−CD45RA−CD9O+CD49f−, CD34+CD38−CD45RA−CD9O−CD49f−, and CD34+CD38−CD45RA−CD9O−CD49f+ cells) and subjected to NGS to measure the editing efficiency (Table 28). It is important to note that all hematopoietic subsets, including the subsets enriched in long-term HSCs, displayed similarly high gene editing efficiencies (>95%). This high gene editing efficiency in long-term HSCs has significant therapeutic impact as these cells are capable of engrafting patients in the long-term and sustain life-long hematopoietic multi-lineage regeneration.

TABLE 28
Editing efficiency in each HSPC subset measured by NGS.

| gRNA | HSPC subsets | Avg (% Indels) |
|---|---|---|
| Dg CR00312 | Total (singlets) | 97.98% |
| | CD34+CD38−CD45RA− | 98.66% |
| | CD34+CD38−CD45RA−CD90+CD49f− | 98.19% |
| | CD34+CD38−CD45RA−CD90−CD49f− | 98.70% |
| | CD34+CD38−CD45RA−CD90−CD49f+ | 98.81% |
| Dg | Total (singlets) | 97.62% |
| CR001128 | CD34+CD38−CD45RA− | 95.93% |
| | CD34+CD38−CD45RA−CD90−CD49f− | 98.00% |
| | CD34+CD38−CD45RA−CD90−CD49f+ | 99.01% |

### Example 9 Evaluation of Potential Off-Target Editing

### HSPC Culture and CRISPR/Cas9 Genome Editing

[0856] Methods for RNP generation and cell manipulation are as in Example 4, with the following exceptions. Human CD34⁺ cell culture Human CD34+ cells were either isolated from G-CSF mobilized peripheral blood from adult donors (AllCells, Cat. No. mPB025-Reg.E) using immunoselection (Miltenyi) according to the manufacturer's instructions or derived from bone marrow (Hemacare Corporation, Cat. No. BM34C-3). CD34+ cells were thawed and expanded for 2 days or 5 days prior to RNP delivery. After RNP delivery, cells were either cultured for an additional 13 days in expansion medium or cultured in erythroid differentiation medium for 7 or 11 days as follows. During days 0-7 of culture, EDM was further supplemented with 1 μM hydrocortisone (Sigma H8672), 100 ng/mL human SCF (Life Technologies, Cat. #PHC2113), and 5 ng/mL human IL-3 (Peprotech #10779-598). During days 7-11 of culture, EDM was supplemented with 100 ng/mL of human SCF only. At the conclusion of the culture period, cells were harvested for genomic DNA preparation and analysis.

[0857] Assembly of Cas9 and guide RNA ribonucleoprotein (RNP) complexes, preparation of HSPC, and electroporation of RNP into HSPC. The HSPC collected by centrifugation were resuspended in P3 Primary Cell Solution (Lonza cat. No. PBP3-00675). The RNP was mixed with 20 μL of cells by pipetting up and down and incubated at RT for 2 min. The RNP/cell mixture (20 μL) was electroporated using code CM-137 on the 4D-Nucleofector (Lonza). dgRNAs comprising a crRNA having the sequence NNNNNNNNNNNNNNNNNNNNGUUUUAGAGCUAUGCUGUUUUG (where N indicates a residue of the indicated targeting domain) and a tracr having the sequence of SEQ ID NO: 6660 were used.

### Genomic DNA Extraction

[0858] Genomic DNA was isolated from RNP treated and untreated HSPC using the DNeasy Blood & Tissue Kit (Qiagen, Cat #69506) following the manufacturer's recommendations.

In Silico Identification of Potential gRNA Off-Target Loci

[0859] Potential off-target loci for the BCL11A+58 region gRNAs CR00309, CR00311, CR00312, CR00316, CR001125, CR001126, CR001127, and CR001128, and the HPFH region gRNAs CR001028, CR001030, CR001137, CR001221, CR003035, and CR003085 were identified as follows. For each gRNA, the 20 nucleotide gRNA protospacer sequence was aligned to the human genome reference sequence (build GRCh38) using the BFAST sequence aligner (version 0.6.4f, Homer et al, PLoS One, 2009, 4(11), e7767, PMID: 19907642) using standard parameters allowing up to 5 nucleotide mismatches. Loci identified were filtered to only contain sites that are 5′ adjacent to the Cas9 canonical 5′-NGG-3′ PAM sequence (i.e. 5′-off-target locus-PAM-3′). Using the BEDTools script (version 2.11.2, Quinlan and Hall, Bioinformatics, 2010 26(6):841-2, PMID: 20110278) sites with 5 nucleotide mismatches were further filtered against RefSeq gene annotations (Pruitt et al, Nucleic Acids Res., 2014 42(Database issue):D756-63, PMID: 24259432) to only contain loci annotated as exons. Counts of the potential off-target loci identified for the BCL11A+58 region and the HPFH region gRNAs are shown in Tables 1 and 2 respectively.

TABLE 29
Counts of in silico off-target loci identified for the
BCL11A +58 region gRNAs CR00309, CR00311, CR00312,
CR00316, CR001125, CR001126, CR001127, and CR001128
with 0, 1, 2, 3 and 4 nucleotide mismatches and 5 nucleotide
mismatches within RefSeq exons are shown.

| gRNA | | | | | | | |
|---|---|---|---|---|---|---|---|
| targeting | Number of off-targets with N mismatches | | | | | | |
| domain ID | 0 | 1 | 2 | 3 | 4 | 5 RefSeq exons | Total sites |
| CR00309 | 0 | 0 | 2 | 9 | 77 | 52 | 140 |
| CR00311 | 0 | 0 | 3 | 13 | 213 | 38 | 267 |
| CR00312 | 0 | 0 | 0 | 6 | 126 | 33 | 165 |
| CR00316 | 0 | 0 | 0 | 22 | 234 | 90 | 346 |
| CR001125 | 0 | 0 | 1 | 16 | 221 | 83 | 321 |
| CR001126 | 0 | 0 | 2 | 26 | 235 | 86 | 349 |
| CR001127 | 0 | 0 | 1 | 35 | 331 | 157 | 524 |
| CR001128 | 0 | 0 | 0 | 9 | 156 | 42 | 207 |

TABLE 30
Counts of in silico off-target loci identified for the
HPFH region gRNAs CR001028, CR001030, CR001137,
CR001221, CR003035, and CR003085 with 0, 1, 2, 3
and 4 nucleotide mismatches and 5 nucleotide mismatches
within RefSeq exons are shown.

| gRNA | | | | | | | |
|---|---|---|---|---|---|---|---|
| targeting | Number of off-targets with N mismatches | | | | | | |
| domain ID | 0 | 1 | 2 | 3 | 4 | 5 RefSeq exons | Total sites |
| CR001028 | 0 | 0 | 1 | 11 | 154 | 67 | 233 |
| CR001030 | 0 | 0 | 0 | 14 | 125 | 85 | 224 |
| CR001137 | 0 | 0 | 1 | 6 | 85 | 21 | 113 |
| CR001221 | 0 | 0 | 2 | 17 | 166 | 44 | 229 |
| CR003035 | 0 | 0 | 4 | 10 | 158 | 77 | 249 |
| CR003085 | 0 | 0 | 0 | 5 | 75 | 16 | 96 |

### PCR Primer Design for Targeted Amplification of Potential Off-Target Sites

[0860] PCR amplicons targeting potential off-target loci (and the on-target locus) identified for the BCL11A +58 region gRNAs (CR00309, CR00311, CR00312, CR00316, CR001125, CR001126, CR001127, and CR001128) and the HPFH region gRNAs (CR001028, CR001030, CR001137, CR001221, CR003035, and CR003085) were design using Primer3 (version 2.3.6, Untergasser et al, Nucleic Acids Res., 2012 40(15):e115, PMID: 22730293) using default parameters aiming for an amplicon size range of approximately 160-300 base pairs in length with the gRNA protospacer sequence located in the center of the amplicon. For gRNA CR001127 PCR primers were only designed for sites with 0-4 nucleotide mismatches, no primers were designed for sites with 5 nucleotide mismatches within RefSeq exons. Resulting PCR primer pairs and amplicon sequences were checked for uniqueness by BLAST searching (version 2.2.19, Altschul et al, J Mol Biol., 1990, 215(3):403-10, PMID: 2231712) sequences against the human genome reference sequence (build GRCh38). Primer pairs resulting in more than one amplicon sequence were discarded and redesigned. Tables 3 and 5 show counts of successful PCR primer pairs designed for the BCL11A+58 region and the HPFH region gRNAs respectively.

### Illumina Sequencing Library Preparation, Quantification and Sequencing

[0861] Genomic DNA from RNP treated (2 replicates per gRNA) and untreated (1 replicate per gRNA) HSPC samples was quantified using the Quant-iT PicoGreen dsDNA kit (Thermo Fisher, Cat # P7581) using manufacture's recommendations. Illumina sequencing libraries targeting individual off-target loci (and the on-target locus) were generated for each sample using two sequential PCR reactions. The first PCR amplified the target locus using target specific PCR primers (designed above) that were tailed with universal Illumina sequencing compatible sequences. The second PCR added additional Illumina sequencing compatible sequences to the first PCR amplicon, including sample barcodes to enable multiplexing during sequencing. PCR 1 was performed in a final volume of 10 μL with each reaction containing 3-6 ng of gDNA (equivalent to approximately 500-1000 cells), PCR 1 primer pairs (Integrated DNA Technologies) at a final concentration of 0.25 μM and 1× final concentration of Q5 Hot Start Master Mix (New England BioLabs, Cat #102500-140). PCR 1 left primers were 5′ tailed (i.e. 5′-tail-target specific left primer-3′) with sequence 5′-TCGTCGGCAGCGTCAGATGTGTATAAGAGACAG-3′ and right primers were 5′ tailed (i.e. 5′-tail-target specific right primer-3′) with sequence 5′-GTCTCGTGGGCTCGGAGATGTGTATAAGAGACAG-3′. PCR 1 was performed on a thermocycler using the following cycling conditions: 1 cycle of 98° C. for 1 min; 25 cycles of 98° C. for 10 sec, 63° C. for 20 sec, and 72° C. for 30 sec; 1 cycle at 72° C. for 2 min. PCR 1 was then diluted 1 in 100 using nuclease free water (Ambion, Cat # AM9932) and used as input into PCR 2. PCR 2 was performed in a final volume of 10 μL with each reaction containing 2 μL of diluted PCR 1 product, PCR 2 primer pairs (Integrated DNA Technologies) at a final concentration of 0.5 μM and 1× final concentration of Q5 Hot Start Master Mix (New England BioLabs, Cat #102500-140). PCR 2 left primer sequence used was 5′-AATGATACGGCGACCACCGAGATCTACACNNNNNNNNTCGTCGGCAGCGTC-3′ and PCR 2 right primer sequence used was 5′-CAAGCAGAAGACGGCATACGAGATNNNNNNNNGTCTCGTGGGCTCGG-3′ where the NNNNNNNN denote an 8 nucleotide barcode sequence used for sample multiplexing as part of the standard Illumina sequencing process. PCR 2 was performed on a thermocycler using the following cycling conditions: 1 cycle of 72° C. for 3 min; 1 cycle of 98° C. for 2 min; 15 cycles of 98° C. for 10 sec, 63° C. for 30 sec, and 72° C. for 2 min. PCR 2 amplicons, now viable Illumina sequencing libraries, were cleaned up using Agencourt AMPure XP beads (Beckman Coulter, Cat # A63882) following the manufacture's recommendations. The cleaned Illumina sequencing libraries were then quantified using standard qPCR quantification methods using Power SYBR Green PCR master mix (Life Technologies, Cat #4367660) and primers specific to the Illumina sequencing library ends (forward primer sequence 5′-CAAGCAGAAGACGGCATACGA-3′ and reverse primer sequence 5′-AATGATACGGCGACCACCGAGA-3′) Illumina sequencing libraries were then pooled equimolar and subjected to Illumina sequencing on a MiSeq instrument (Illumina, Cat # SY-410-1003) with 300 base paired-end reads using a MiSeq Reagent Kit v3 (Illumina, Cat # MS-102-3003) following the manufacture's recommendations. A minimum of 1000-fold sequence coverage was generated for each locus for at least one treated replicate. PCR, cleanup, pooling and sequencing of treated and untreated samples were performed separately to avoid any possibility of cross contamination between treated and untreated samples or PCR amplicons generated therefrom.

### Illumina Sequencing Data QC and Variant Analysis

[0862] Using default parameters, the Illumina MiSeq analysis software (MiSeq reporter, version 2.6.2, Illumina) was used to generate amplicon specific FASTQ sequencing data files (Cock et al, Nucleic Acids Res. 2010, 38(6):1767-71, PMID: 20015970). FASTQ files were then processed through an internally developed variant analysis pipeline consisting of a series of public domain software packages joined together using a standard Perl script wrapper. The workflow used was divided into five stages.

### Stage 1, PCR Primer and On- and Off-Target Sequence QC:

[0863] For both on- and off-target sites the 20 nucleotide gRNA protospacer sequence plus PAM sequence and target specific PCR primer sequences (left and right without the additional Illumina sequences) were aligned to the human genome reference sequence (build GRCh38) using a BLAST search (version 2.2.29+, Altschul et al, J Mol Biol., 1990, 215(3):403-10, PMID: 2231712). On- and off-target sites with multiple genomic locations were flagged.

### Stage 2, Sequencer File Decompression:

[0864] Illumina sequencer generated FASTQ.GZ files were decompressed to FASTQ files using the gzip script (version 1.3.12) and number of reads per file was calculated. Files with no reads were excluded from further analysis.

### Stage 3, Sequence Read Alignment and Quality Trimming:

[0865] Sequencing reads in FASTQ files were aligned to the human genome reference sequence (build GRCh38) using the BWA-MEM aligner (version 0.7.4-r385, Li and Durbin, Bioinformatics, 2009, 25(14):1754-60, PMID: 19451168) using ‘hard-clipping’ to trim 3′ ends of reads of Illumina sequences and low quality bases. Resulting aligned reads, in the BAM file format (Li et al, Bioinformatics, 2009 25(16):2078-9, PMID: 19505943), were converted to FASTQ files using the SAMtools script (version 0.1.19-44428cd, Li et al, Bioinformatics, 2009 25(16):2078-9, PMID: 19505943). FASTQ files were then aligned again to the human genome reference sequence (build GRCh38) using the BWA-MEM aligner, this time without ‘hard-clipping’.

### Stage 4, Variant (SNP and INDEL) Analysis:

[0866] BAM files of aligned reads were processed using the VarDict variant caller (version 1.0 ‘Cas9 aware’ modified by developer ZhangWu Lia, Lai et al, Nucleic Acids Res., 2016, 44(11):e108, PMID: 27060149) with allele frequency detection limit set at >=0.0001 to identify variants (SNPs and INDELs). The Cas9 aware VarDict caller is based on a public domain package but able to move ambiguous variant calls, generated due to repetitive sequences in the alignment region of the variant events, toward the potential Cas9 nuclease cut site in the gRNA protospacer sequence located 3 bases 5′ of the PAM sequence. The SAMtools script was used to calculate read coverage per sample amplicon to determine whether the on- and off-target sites were covered at >1000-fold sequence coverage. Sites with <1000-fold sequence coverage were flagged.

Stage 5, dbSNP Filtering and Treated/Untreated Differential Analysis:

[0867] Variants identified were filtered for known variants (SNPs and INDELs) found in dbSNP (build 142, Shery et al, Nucleic Acids Res. 2001, 29(1):308-11, PMID: 11125122). Variants in the treated samples were further filtered to exclude: 1) variants identified in the untreated control samples; 2) variants with a VarDict strand bias of 2:1 (where forward and reverse read counts supporting the reference sequence are balanced but imbalanced for the non-reference variant call); 3) variants located outside a 100 bp window around the potential Cas9 cut site; 4) single nucleotide variants within a 100 bp window around the potential Cas9 cut site. Finally only sites with a combined INDEL frequency of >2% (editing in more than approximately 10-20 cell) in a 100 bp window of the potential Cas9 cut site were considered. Potential active editing sites were further examined at the read alignment level using the Integrative Genome Viewer (IGV version 2.3, Robinson et al, Nat Biotechnol. 2011, 9(1):24-6, PMID: 21221095) that allows for visual inspection of read alignments to the genome reference sequence.

### On- and Off-Target Analysis Results

[0868] On-target sites for the BCL11A+58 region and the HPFH region gRNAs showed robust editing at the intended Cas9 cut site in treated samples with an INDEL frequency greater than 88% for all gRNAs. Tables 3 and 5 show number of off-target sites characterized in at least one biological replicate. Uncharacterized sites failed PCR primer design or PCR amplification and remain under investigation.

### BCL11A+58 Region in Silico Targeted Analysis Results

[0869] gRNA CR00309:

[0870] The on-target site for gRNA CR00309 showed robust editing at the intended Cas9 cut site with an average INDEL frequency of approximately 92%. Table 31 shows the number of off-target sites characterized. Uncharacterized sites failed in PCR primer design or PCR amplification and remain under investigation. Characterization of potential off-target sites identified four off-target sites in the 100 bp window around the proposed Cas9 cut site in both treated replicates. Site 1 has an average INDEL frequency approximately 18%, has 3 mismatches relative to the on-target gRNA protospacer sequence (5′-CtCaCCtCCACCCTAATCAG-PAM-3′, PAM=AGG) and is located in intron 1 of the Anoctamin 5 gene (ANO5), on chromosome 11 at base pair position 22,195,800-22,195,819, approximately 2.3 kb away from exon 1. Site 2 has an average INDEL frequency of approximately 18%, has 2 mismatches relative to the on-target gRNA protospacer sequence (5′-CACGCCCaCACCtTAATCAG-PAM-3′, PAM=GGG) and is located in an intergenic region of chromosome 12 at base pair position 3,311,901-3,311,926. Site 3 has an average INDEL frequency approximately 80%, has 2 mismatches relative to the on-target gRNA protospacer sequence (5′-CACGaCCCaACCCTAATCAG-PAM-3′, PAM=AGG) and is located in a GenBank (Clark et al., Nucleic Acids Res. 2016 Jan. 4; 44(Database issue): D67-D72, PMID: 26590407) transcript (BC012501 not annotated in RefSeq) on chromosome 1 at base pair position 236,065,415-236,065,434. Site 4 has an average INDEL frequency of approximately 2%, has 4 mismatches relative to the on-target gRNA protospacer sequence (5′-CtaGCCCCtACCCTAATaAG-3′, PAM=TGG) and is located in intron 1 of a GenBank annotated transcript called polyhomeotic 2 protein (not annotated in RefSeq) on chromosome 1 at base pair position 33,412,659-33,412,678.

[0871] gRNA CR00311:

[0872] The on-target site for gRNA CR00311 showed robust editing at the intended Cas9 cut site with an average INDEL frequency of approximately 95%. Table 31 shows the number of off-target sites successfully characterized. Uncharacterized sites failed in PCR primer design or PCR amplification and remain under investigation. To date no significant off-target activity was observed at sites examined.

[0873] gRNA CR000312:

[0874] The on-target site for gRNA CR000312 showed robust editing at the intended Cas9 cut site with an average INDEL frequency of approximately 98%. Table 31 shows the number of off-target sites successfully characterized. Uncharacterized sites failed in PCR primer design or PCR amplification and remain under investigation. To date no significant off-target activity was observed at sites examined.

[0875] gRNA CR000316:

[0876] The on-target site for gRNA CR000316 showed robust editing at the intended Cas9 cut site in with an average INDEL frequency of approximately 91%, however the majority of off-target sites remain to be characterized.

[0877] gRNA CR001125:

[0878] The on-target site for gRNA CR0001125 showed robust editing at the intended Cas9 cut site with an average INDEL frequency of approximately 91%. Table 31 shows the number of off-target sites successfully characterized. Uncharacterized sites failed in PCR primer design or PCR amplification and remain under investigation. To date no significant off-target activity was observed at sites examined.

[0879] gRNA CR001126:

[0880] The on-target site for gRNA CR0001126 showed robust editing at the intended Cas9 cut site with an average INDEL frequency of approximately 92%. Table 31 shows the number of off-target sites successfully characterized. Uncharacterized sites failed in PCR primer design or PCR amplification and remain under investigation. Characterization of potential off-target sites identified two off-target sites to date in the 100 bp window around the proposed Cas9 cut site in both treated replicates. The first site has an average INDEL frequency approximately 2%, has 2 mismatches relative to the on-target gRNA protospacer sequence (5′-TTTATaACAGGCTCCAGaAA-PAM-3′, PAM=TGG) and is located in an intergenic region on chromosome 4 at base pair position 35,881,815-35,881,834, approximately 9.5 kb away from the nearest GenBank transcript (not annotated in RefSeq). The second site has an average INDEL frequency of approximately 1.7%, has 4 mismatches relative to the on-target gRNA protospacer sequence (5′ caTATCACAGGCcCCAGGAg-PAM-3′, PAM=GGG) and is located in intron 6 of the Ataxin 1 gene (ATXN1), on chromosome 6 at base pair position 16,519,907-16,519,926, approximately 2.7 kb away from exon 6.

[0881] gRNA CR001127:

[0882] The on-target site for gRNA CR0001127 showed robust editing at the intended Cas9 cut site with an average INDEL frequency of approximately 97%. Table 31 shows the number of off-target sites successfully characterized. Uncharacterized sites failed in PCR primer design or PCR amplification and remain under investigation. To date no significant off-target activity was observed at sites examined.

[0883] gRNA CR001128:

[0884] The on-target site for gRNA CR0001128 showed robust editing at the intended Cas9 cut site with an average INDEL frequency of approximately 94%. Table 31 shows the number of off-target sites successfully characterized. Uncharacterized sites failed in PCR primer design or PCR amplification and remain under investigation. To date no significant off-target activity was observed at sites examined.

[0885] Manual inspection of all actively edited BCL11 +58 region off-target sites identified showed typical INDEL patterns surrounding the proposed Cas9 cut site typical of Cas9 mediated double stranded break non homologous end joining DNA repair. It is unclear whether editing at the sites identified has any detrimental effect on gene expression or cell viability, further analysis is required.

TABLE 31
Counts of in silico off-target sites identified, sites successfully
characterized in at least one treated replicate and sites that show
editing for the BCL11A +58 region gRNAs CR00309, CR00311,
CR00312, CR00316, CR001125, CR001126, CR001127, and
CR001128 are shown.

| | Total | Number of in | |
|---|---|---|---|
| | number of | silico off- | Number |
| | in silico | target sites | of active in silico |
| gRNA name | off-target sites | characterized | off-target sites identified |
| CR00309 | 141 | 140 | 4 |
| CR00311 | 267 | 245 | 0 |
| CR00312 | 165 | 163 | 0 |
| CR00316 | 346 | TBD | TBD |
| CR001125 | 321 | 319 | 0 |
| CR001126 | 349 | 348 | 2 |
| CR001127* | 367 | 365 | 0 |
| CR001128 | 207 | 194 | 0 |

*only sites with 0-4 nucleotide mismatches were examined.

### BCL11A+58 Region GUIDE-Seq Hit Validation Results

[0886] Potential off-target hits identified by GUIDE-seq (Tsai et al, Nat Biotechnol. 2015, 33(2):187-97, PMID: 25513782) were characterized in RNP treated and untreated HSPC using targeted sequencing methods described above for in silico defined sites. GUIDE-seq potential hits were identified for gRNAs CR00312, CR00316, CR001125, CR001126, CR001127 and CR001128. No potential hits were identified for gRNA CR00311 and CR001128. When the potential hits were interrogated in HSPCs using targeted sequencing, none of the potential hits validated in treated HSPC for gRNA CR00312, CR001125 and CR001127. One potential hit validated for gRNA CR001126, the same site that was identified by the in silico directed method in intron 6 of ATXN1 (chromosome 6:16,519,907-16,519,926 base pairs).Validation of potential hits for gRNAs CR00309 and CR00316 is still in progress.

### HPFH Region in Silico Targeted Analysis Results

[0887] gRNA CR001028:

[0888] The on-target site for gRNA CR0001028 showed robust editing at the intended Cas9 cut site with an average INDEL frequency of approximately 91%. Table 32 shows the number of off-target sites successfully characterized. Uncharacterized sites failed in PCR primer design or PCR amplification and remain under investigation. Characterization of potential off-target sites identified two off-target sites to date in the 100 bp window around the proposed Cas9 cut site in both treated replicates. Site 1 has an average INDEL frequency approximately 2.8%, has 2 mismatches relative to the on-target gRNA protospacer sequence (5′-TGgGGTGGGGAGATATGaAG-PAM-3′, PAM=AGG) and is located in intron 2 of a non-coding RNA (LF330410, not annotated in RefSeq) located on chromosome 4 at base pair position 58,169,308-58,169,327. Site 2 has an average INDEL frequency approximately 3.5%, has 3 mismatches relative to the on-target gRNA protospacer sequence (5′-gGaGGTGGGGAGAgATGTAG-PAM-3′, PAM=AGG) and is located in intron 1 of the Butyrophilin subfamily 3 member A2 gene (BTN3A2) located on chromosome 6 at base pair position 26,366,733-26,366,752, approximately 1.3 kb from exon 2.

[0889] gRNA CR001030:

[0890] The on-target site for gRNA CR0001030 showed robust editing at the intended Cas9 cut site with an average INDEL frequency of approximately 89%. Table 32 shows the number of off-target sites successfully characterized. Uncharacterized sites failed in PCR primer design or PCR amplification and remain under investigation. Characterization of potential off-target sites identified one off-target sites to date with average INDEL frequency of 57% in the 100 bp window around the proposed Cas9 cut site in both treated replicates. The site has 3 mismatches relative to the on-target gRNA protospacer sequence (5′-caTGCgGAAAGAGATGCGGT-PAM-3′, PAM=TGG) and is located in exon 4 of the Pyruvate Dehydrogenase Kinase 3 gene (PDK3) located on the X chromosome at base pair position 24,503,476-24,503,495.

[0891] gRNA CR001137:

[0892] The on-target site for gRNA CR0001037 showed robust editing at the intended Cas9 cut site with an average INDEL frequency of approximately 84%. Table 32 shows the number of off-target sites successfully characterized. Uncharacterized sites failed in PCR primer design or PCR amplification and remain under investigation. To date no significant off-target activity was observed at sites examined.

[0893] gRNA CR001221:

[0894] The on-target site for gRNA CR0001221 showed robust editing at the intended Cas9 cut site with an average INDEL frequency of approximately 95%. Table 32 shows the number of off-target sites successfully characterized. Uncharacterized sites failed in PCR primer design or PCR amplification and remain under investigation. To date no significant off-target activity was observed at sites examined.

[0895] gRNA CR003035:

[0896] The on-target site for gRNA CR0003035 showed robust editing at the intended Cas9 cut site with an average INDEL frequency of approximately 89%. Table 32 shows the number of off-target sites successfully characterized. Uncharacterized sites failed in PCR primer design or PCR amplification and remain under investigation. Characterization of potential off-target sites identified two off-target sites to date in the 100 bp window around the proposed Cas9 cut site in both treated replicates. Site 1 has an average INDEL frequency of approximately 20%, has 2 mismatches relative to the on-target gRNA protospacer sequence (5′-AGGtACCTCAaACTCAGCAT-PAM-3′, PAM=AGG) and is located in an intergenic region on chromosome 2 at base pair position 66,281,781-66,281,800 and is approximately 7.1 kb from the nearest transcript (JD432564, not annotated in RefSeq). Site 2 has an average INDEL frequency approximately 2.5%, has 3 mismatches relative to the on-target gRNA protospacer sequence (5′-AGagACCcCAGACTCAGCAT-PAM-3′, PAM=AGG) and is located in an intergenic region on chromosome 10 at base pair position 42,997,289-42,997,308, and is approximately 0.3 kb from MicroRNA 5100 (MIR5100).

[0897] gRNA CR003085:

[0898] The on-target site for gRNA CR0003038 showed robust editing at the intended Cas9 cut site with an average INDEL frequency of approximately 94%. Table 32 shows the number of off-target sites successfully characterized. Uncharacterized sites failed in PCR primer design or PCR amplification and remain under investigation. Characterization of potential off-target sites identified one off-target sites to date with average INDEL frequency of approximately 2% in the 100 bp window around the proposed Cas9 cut site in both treated replicates. The site has 3 mismatches relative to the on-target gRNA protospacer sequence (5′-ATGGTATGaGAaaTATACTA-PAM-3′, PAM=TGG) and is located in intron 2 of the Solute Carrier Family 25 Member 12 gene (SLC25A12) located on chromosome 2 at base pair position 171,872,630-171,872,649, and is approximately 3.8 kb from exon 3.

[0899] Manual inspection of all actively edited HPFH region off-target sites identified showed typical INDEL patterns surrounding the proposed Cas9 cut site typical of Cas9 mediated double stranded break non homologous end joining DNA repair. It is unclear whether editing at the sites identified has any detrimental effect on gene expression or cell viability, further analysis is required.

TABLE 32
Counts of potential in silico off-target sites identified, sites successfully
characterized in at least one treated replicate and sites that show
editing for the HPFH region gRNAs CR001028, CR001030,
CR001137, CR001221, CR003035 and CR003085 are shown.

| | | Number of in | |
|---|---|---|---|
| | Total number | silico off- | Number of |
| | of in silico | target sites | active in silico |
| gRNA name | off-target sites | characterized | off-target sites identified |
| CR001028 | 233 | 217 | 2 |
| CR001030 | 224 | 219 | 1 |
| CR001137 | 113 | 109 | 0 |
| CR001221 | 229 | 224 | 0 |
| CR003035 | 249 | 243 | 2 |
| CR003085 | 96 | 95 | 1 |

### HPFH Region GUIDE-Seq Hit Validation Results

[0900] Potential off-target hits identified using GUIDE-seq (Tsai et al, Nat Biotechnol. 2015, 33(2):187-97, PMID: 25513782) were interrogated in RNP treated and untreated HSPC using the same methods described for in silico sites. GUIDE-seq potential off-target hits were identified for gRNA CR001028, CR001030, CR003035 and CR003085 (to date). No hits were identified for gRNAs CR001137 and CR001221 to date. One hit for gRNA CR001028 validated in HSPC, the same site that was identified by the in silico directed method on chromosome 4 at base pair position 58,169,308-58,169,327. One hit validated for gRNA CR001030 in HSPC, the same site that was identified by the in silico directed method in exon 4 of the PDK3 gene. One hit validated for gRNA CR003035 in HSPC, the same site that was identified by the in silico directed method in the intergenic region of chromosome 2 at base pair position 66,281,781-66,281,800. One hit validated for gRNA CR003085 in HSPC, the same site as was identified by the in silico directed method on chromosome 2 at base pair position 171,872,630-171,872,649.

On-Target Analysis for gRNA Editing Efficiency Screening

[0901] PCR amplicons targeting the gRNA on-target site were cleaned up using Agencourt AMPure XP beads (Beckman Coulter, Cat # A63882) following the manufacture's recommendations. Samples were quantified using the Quant-iT PicoGreen dsDNA kit (Thermo Fisher, Cat # P7581) using manufacture's recommendations. Amplicons were transformed into Illumina sequencing libraries using the Nextera DNA Library Preparation Kit (Illumina, Cat# FC-121-1031) following the manufacture's recommendations. Resulting sequencing libraries were AMPure bead cleaned up, qPCR quantified, pooled and sequenced with an Illumina MiSeq instrument using 150 base (Illumina, Cat# MS-102-2002) or 250 base (Illumina, Cat# MS-102-2003) paired-end reads as described in the off-target analysis section. For each library a minimum of a 1000-fold sequencing coverage was generated and variants were called using a series of in house scripts. In short, sequencing reads spanning an 80-100 base pair window centered on the gRNA sequence were identified using a string based sequence search, compared to the amplicon sequence, binned by sequence differences and variant frequencies were calculated. Additionally, sequencing reads were aligned to the amplicon sequence using the Illumina MiSeq reporter software (Illumina version 2.6.1) and resulting read alignments were examined using the Integrative Genome Viewer (IGV version 2.3, Robinson et al, Nat Biotechnol. 2011, 9(1):24-6, PMID: 21221095).

### Example 10: Evaluation of RNP Concentration On Gene Editing and HbF Induction

### RNP Dilution Assay to Determine Optimal RNP Concentration for Gene Editing

[0902] Gene editing was performed using a serial dilution of Cas9 (iProt: 106331) and guide ribonucleotide complexes (RNP) concentrations (Table 33). Various gRNA used, their formats, and modification applied in this assay are listed in Table 34.

TABLE 33
RNP dilution used to investigate RNP concentration effect
on gene editing and HbF induction.

| | | RNP | RNP | RNP | RNP | RNP |
|---|---|---|---|---|---|---|
| gRNA | RNP | Conc | Conc | Conc | Conc | Conc |
| Format | Components | RNP-1 | RNP-2 | RNP-3 | RNP-4 | RNP-5 |
| Single | crRNA (ug) | 3 | 1.5 | 0.75 | 0.37 | 0.18 |
| gRNA | Cas9 (ug) | 3 | 1.5 | 0.75 | 0.37 | 0.18 |
| | RNP (uM) | 1.94 | 0.97 | 0.48 | 0.24 | 0.12 |
| Dual | crRNA (ug) | 3.86 | 1.93 | 0.97 | 0.48 | 0.24 |
| gRNA | tracrRNA (ug) | 3.86 | 1.93 | 0.97 | 0.48 | 0.24 |
| | Cas9 (ug) | 3.86 | 1.93 | 0.97 | 0.48 | 0.24 |
| | RNP (uM) | 5.89 | 2.94 | 1.47 | 0.74 | 0.37 |

TABLE 34
List of gRNAs, in single or dual guide format, with or without chemical
modification used in the RNP dilution assay. “OMePS” modification,
with respect to dgRNA format, refers to modified crRNA having
the following structure:
mN*mN*mN*NNNNNNNNNNNNNNNNNGUUUUAGAGCUAUGC
UGUU*mU*mU*mG paired with unmodified tracr (i.e., tracrRNA)
of SEQ ID NO: 6660; and with respect to sgRNA, refers to a
gRNA having the following structure:
mN*mN*mN*NNNNNNNNNNNNNNNNNGUUUUAGAGCUAGAAA
UAGCAAGUUAAAAUAAGGCUAGUCCGUUAUCAACUUGAAA
AAGUGGCACCGAGUCGGUGCmU*mU*mU*U, where
N = a nucleotide
of the targeting domain, mN refers to a 2′-OMe-modified nucelotide, and *
refers to a phosphorothioate bond. “Unmodified” refers to a gRNA
having no RNA modifications: dgRNA consist of NNNNNNNNNNNNN
NNNNNNNGUUUUAGAGCUAUGCUGUUUUG paired with SEQ ID
NO: 6660; sgRNA refer to
NNNNNNNNNNNNNNNNNNNNGUUUUAGAGCUAGAAAUAGCA
AGUUAAAAUAAGGCUAGUCCGUUAUCAACUUGAAAAAGUG
GCACCGAGUCGGUGCUUUU, where N = the
nucleotides of the indicated targeting domain

| gRNA | | gRNA Targeting | |
|---|---|---|---|
| Format | Sample ID | Domain ID | gRNA Modification |
| Dual gRNA | 1 | CR00312 | Unmodified |
| | 2 | CR001128 | Unmodified |
| | 3 | CR00312 | OMePS |
| | 4 | CR001128 | OMePS |
| Single gRNA | 5 | CR00312 | Unmodified |
| | 6 | CR001128 | Unmodified |
| | 7 | CR00312 | OMePS |
| | 8 | CR001128 | OMePS |
| | 9 | Mock electroporation | N/A |
| | | control | |

[0903] CD34+ cells were electroporated as described previously, and subjected to measurement of cell viability, gene editing efficiency, and ability to produce HbF. When assessing cell viability, the results showed that varying RNP concentration had no impact on cell viability upon electroporation, either when single or dual guide format is used (FIG. 39A and FIG. 39B). Upon gene editing of CD34+ cells, NGS data showed that RNP concentrations down to 1.47 uM achieved maximum % gene editing efficiency for unmodified CR00312 and CR001128, and modified CR00312, while maximum % gene editing efficiency for modified CR001228 was achieved at RNP concentrations as low as 2.94 uM (FIG. 40A). For sgRNA formats, all gRNAs tested achieved maximum % editing at RNP concentrations down to 0.48 uM (FIG. 40B). In measuring the ability of gene edited cells to differentiate into erythroid lineage and produce HbF, our data showed that the RNP concentration down to 2.94 uM for dgRNA-containing RNP (FIG. 41A) and down to 0.97 uM for sgRNA-containing RNP (FIG. 41B) resulted in maximum levels of HbF induction.

[0904] This application is being filed with a sequence listing. To the extent there are any discrepancies between the sequence listing and any sequence recited in the specification, the sequence recited in the specification should be considered the correct sequence. Unless otherwise indicated, all genomic locations are according to hg38.

### INCORPORATION BY REFERENCE

[0905] All publications, patents, and patent applications mentioned herein are hereby incorporated by reference in their entirety as if each individual publication, patent or patent application was specifically and individually indicated to be incorporated by reference. In case of conflict, the present application, including any definitions herein, will control.

### EQUIVALENTS

[0906] Those skilled in the art will recognize, or be able to ascertain using no more than routine experimentation, many equivalents to the specific embodiments of the invention described herein. While this invention has been disclosed with reference to specific aspects, it is apparent that other aspects and variations of this invention may be devised by others skilled in the art without departing from the true spirit and scope of the invention. The appended claims are intended to be construed to include all such aspects and equivalent variations.

1. A gRNA molecule comprising a tracr and crRNA, wherein the crRNA comprises a targeting domain that is complementary with a target sequence of a BCL11A gene (e.g., a human BCL11a gene), a BCL11a enhancer (e.g., a human BCL11a enhancer), or a HFPH region (e.g., a human HPFH region).

2. A gRNA molecule of claim 1, wherein the target sequence is of the BCL11A gene, and the targeting domain comprises, e.g., consists of, any one of SEQ ID NO: 1 to SEQ ID NO: 85 or SEQ ID NO: 400 to SEQ ID NO: 1231.

3. A gRNA molecule of claim 1, wherein the target sequence is of a BCL11a enhancer, and the targeting domain comprises, e.g., consists of, any one of SEQ ID NO: 1232 to SEQ ID NO: 1499.

4. A gRNA molecule of claim 1, wherein the target sequence is of a BCL11a enhancer, and the targeting domain comprises, e.g., consists of, any one of SEQ ID NO: 182 to SEQ ID NO: 277 or SEQ ID NO: 334 to SEQ ID NO: 341.

5. A gRNA molecule of claim 4, wherein the targeting domain comprises, e.g., consists of, any one of SEQ ID NO: 341, SEQ ID NO: 246, SEQ ID NO: 248, SEQ ID NO: 247, SEQ ID NO: 245, SEQ ID NO: 249, SEQ ID NO: 244, SEQ ID NO: 199, SEQ ID NO: 251, SEQ ID NO: 250, SEQ ID NO: 334, SEQ ID NO: 185, SEQ ID NO: 186, SEQ ID NO: 336, or SEQ ID NO: 337.

6. A gRNA molecule of claim 4, wherein the targeting domain comprises, e.g., consists of, any one of SEQ ID NO: 247, SEQ ID NO: 248, SEQ ID NO: 335, SEQ ID NO: 336, SEQ ID NO: 337, or SEQ ID NO: 338.

7. A gRNA molecule of claim 4, wherein the targeting domain comprises, e.g., consists of, any one of SEQ ID NO: 248 or SEQ ID NO: 338.

8. A gRNA molecule of claim 4, wherein the targeting domain comprises, e.g., consists of, SEQ ID NO: 248.

9. A gRNA molecule of claim 4, wherein the targeting domain comprises, e.g., consists of, SEQ ID NO: 338.

10. A gRNA molecule of claim 1, wherein the target sequence is of a BCL11a enhancer, and the targeting domain comprises, e.g., consists of, any one of SEQ ID NO: 278 to SEQ ID NO: 333.

11. A gRNA molecule of claim 10, wherein the targeting domain comprises, e.g., consists of, any one of SEQ ID NO: 318, SEQ ID NO: 312, SEQ ID NO: 313, SEQ ID NO: 294, SEQ ID NO: 310, SEQ ID NO: 319, SEQ ID NO: 298, SEQ ID NO: 322, SEQ ID NO: 311, SEQ ID NO: 315, SEQ ID NO: 290, SEQ ID NO: 317, SEQ ID NO: 309, SEQ ID NO: 289, or SEQ ID NO: 281.

12. A gRNA molecule of claim 10, wherein the targeting domain comprises, e.g., consists of, SEQ ID NO: 318.

13. A gRNA molecule of claim 1, wherein the target sequence is of a BCL11a enhancer, and the targeting domain comprises, e.g., consists of, any one of SEQ ID NO: 1596 to SEQ ID NO: 1691.

14. A gRNA molecule of claim 13, wherein the targeting domain comprises, e.g., consists of, any one of SEQ ID NO: 1683, SEQ ID NO: 1638, SEQ ID NO: 1647, SEQ ID NO: 1609, SEQ ID NO: 1621, SEQ ID NO: 1617, SEQ ID NO: 1654, SEQ ID NO: 1631, SEQ ID NO: 1620, SEQ ID NO: 1637, SEQ ID NO: 1612, SEQ ID NO: 1656, SEQ ID NO: 1619, SEQ ID NO: 1675, SEQ ID NO: 1645, SEQ ID NO: 1598, SEQ ID NO: 1599, SEQ ID NO: 1663, SEQ ID NO: 1677, or SEQ ID NO: 1626.

15. A gRNA molecule of claim 1, wherein the target sequence is of a HFPH region (e.g., a French HPFH region), and the targeting domain comprises, e.g., consists of, any one of SEQ ID NO: 86 to SEQ ID NO: 181, SEQ ID NO: 1500 to SEQ ID NO: 1595, or SEQ ID NO: 1692 to SEQ ID NO: 1761.

16. A gRNA molecule of claim 15, wherein the targeting domain comprises, e.g., consists of, any one of SEQ ID NO: 100, SEQ ID NO: 165, SEQ ID NO: 113, SEQ ID NO: 99, SEQ ID NO: 112, SEQ ID NO: 98, SEQ ID NO: 1580, SEQ ID NO: 106, SEQ ID NO: 1503, SEQ ID NO: 1589, SEQ ID NO: 160, SEQ ID NO: 1537, SEQ ID NO: 159, SEQ ID NO: 101, SEQ ID NO: 162, SEQ ID NO: 104, SEQ ID NO: 138, SEQ ID NO: 1536, SEQ ID NO: 1539, SEQ ID NO: 1585.

17. A gRNA molecule of claim 15, wherein the targeting domain comprises, e.g., consists of, any one of SEQ ID NO: 98, SEQ ID NO: 100, SEQ ID NO: 1505, SEQ ID NO: 1589, SEQ ID NO: 1700, or SEQ ID NO: 1750.

18. A gRNA molecule of claim 15, wherein the targeting domain comprises, e.g., consists of, any one of SEQ ID NO: 100, SEQ ID NO: 165, or SEQ ID NO: 113.

19. The gRNA molecule of any of claims 2-18, wherein the targeting domain comprises, e.g., consists of, 17, 18, 19, 20, 21, 22, 23, or 24 consecutive nucleic acids of any one of the recited targeting domain sequences.

20. The gRNA molecule of claim 16, wherein the 17, 18, 19, 20, 21, 22, 23, or 24 consecutive nucleic acids of any one of the recited targeting domain sequences are the 17, 18, 19, 20, 21, 22, 23, or 24 consecutive nucleic acids disposed at the 3′ end of the recited targeting domain sequence.

21. The gRNA molecule of claim 16, wherein the 17, 18, 19, 20, 21, 22, 23, or 24 consecutive nucleic acids of any one of the recited targeting domain sequences are the 17, 18, 19, 20, 21, 22, 23, or 24 consecutive nucleic acids disposed at the 5′ end of the recited targeting domain sequence.

22. The gRNA molecule of claim 16, wherein the 17, 18, 19, 20, 21, 22, 23, or 24 consecutive nucleic acids of any one of the recited targeting domain sequences do not comprise either the 5′ or 3′ nucleic acid of the recited targeting domain sequence.

23. The gRNA molecule of any of claims 2-22, wherein the targeting domain consists of the recited targeting domain sequence.

24. The gRNA molecule of any of the previous claims, wherein a portion of the crRNA and a portion of the tracr hybridize to form a flagpole comprising SEQ ID NO: 6584 or 6585.

25. The gRNA molecule of claim 24, wherein the flagpole further comprises a first flagpole extension, located 3′ to the crRNA portion of the flagpole, wherein said first flagpole extension comprises SEQ ID NO: 6586.

26. The gRNA molecule of claim 24 or 25, wherein the flagpole further comprises a second flagpole extension located 3′ to the crRNA portion of the flagpole and, if present, the first flagpole extension, wherein said second flagpole extension comprises SEQ ID NO: 6587.

27. The gRNA molecule of any of claims 1-26, wherein the tracr comprises SEQ ID NO: 6660 or SEQ ID NO: 6661.

28. The gRNA molecule of any of claims 1-26, wherein the tracr comprises SEQ ID NO: 7812, optionally further comprising, at the 3′ end, an additional 1, 2, 3, 4, 5, 6, or 7 uracil (U) nucleotides.

29. The gRNA molecule of any of claims 1-28, wherein the crRNA comprises, from 5′ to 3′, [targeting domain]-:
a) SEQ ID NO: 6584;
b) SEQ ID NO: 6585;
c) SEQ ID NO: 6605;
d) SEQ ID NO: 6606;
e) SEQ ID NO: 6607;
f) SEQ ID NO: 6608; or
g) SEQ ID NO: 7806.

30. The gRNA molecule of any of claim 1-23 or 29, wherein the tracr comprises, from 5′ to 3′:
a) SEQ ID NO: 6589;
b) SEQ ID NO: 6590;
c) SEQ ID NO: 6609;
d) SEQ ID NO: 6610;
e) SEQ ID NO: 6660;
f) SEQ ID NO: 6661;
g) SEQ ID NO: 7812;
h) SEQ ID NO: 7807;
i) (SEQ ID NO: 7808;
j) SEQ ID NO: 7809;
k) any of a) to j), above, further comprising, at the 3′ end, at least 1, 2, 3, 4, 5, 6 or 7 uracil (U) nucleotides, e.g., 1, 2, 3, 4, 5, 6, or 7 uracil (U) nucleotides;
l) any of a) to k), above, further comprising, at the 3′ end, at least 1, 2, 3, 4, 5, 6 or 7 adenine (A) nucleotides, e.g., 1, 2, 3, 4, 5, 6, or 7 adenine (A) nucleotides; or
m) any of a) to l), above, further comprising, at the 5′ end (e.g., at the 5′ terminus), at least 1, 2, 3, 4, 5, 6 or 7 adenine (A) nucleotides, e.g., 1, 2, 3, 4, 5, 6, or 7 adenine (A) nucleotides.

31. The gRNA molecule of any of claims 1-23, wherein the targeting domain and the tracr are disposed on separate nucleic acid molecules, and wherein the nucleic acid molecule comprising the targeting domain comprises SEQ ID NO: 6607, optionally disposed immediately 3′ to the targeting domain, and the nucleic acid molecule comprising the tracr comprises, e.g., consists of, SEQ ID NO: 6660.

32. The gRNA molecule of any of claims 27-28, wherein the crRNA portion of the flagpole comprises SEQ ID NO: 6607 or SEQ ID NO: 6608.

33. The gRNA molecule of any of claims 1-26, wherein the tracr comprises SEQ ID NO: 6589 or 6590, and optionally, if a first flagpole extension is present, a first tracr extension, disposed 5′ to SEQ ID NO: 6589 or 6590, said first tracr extension comprising SEQ ID NO: 6591.

34. The gRNA molecule of any of claims 1-33, wherein the targeting domain and the tracr are disposed on separate nucleic acid molecules.

35. The gRNA molecule of any of claims 1-33, wherein the targeting domain and the tracr are disposed on a single nucleic acid molecule, and wherein the tracr is disposed 3′ to the targeting domain.

36. The gRNA molecule of claim 35, further comprising a loop, disposed 3′ to the targeting domain and 5′ to the tracr.

37. The gRNA molecule of claim 36, wherein the loop comprises SEQ ID NO: 6588.

38. The gRNA molecule of any of claims 1-23, comprising, from 5′ to 3′, [targeting domain]-:
(a) SEQ ID NO: 6601;
(b) SEQ ID NO: 6602;
(c) SEQ ID NO: 6603;
(d) SEQ ID NO: 6604;
(e) SEQ ID NO: 7811; or
(f) any of (a) to (e), above, further comprising, at the 3′ end, 1, 2, 3, 4, 5, 6 or 7 uracil (U) nucleotides.

39. The gRNA molecule of any of claims 1-40, wherein the targeting domain and the tracr are disposed on a single nucleic acid molecule, and wherein said nucleic acid molecule comprises, e.g., consists of, said targeting domain and SEQ ID NO: 7811, optionally disposed immediately 3′ to said targeting domain.

40. The gRNA molecule of any of claims 1-39 wherein one, or optionally more than one, of the nucleic acid molecules comprising the gRNA molecule comprises:
a) one or more, e.g., three, phosphorothioate modifications at the 3′ end of said nucleic acid molecule or molecules;
b) one or more, e.g., three, phosphorothioate modifications at the 5′ end of said nucleic acid molecule or molecules;
c) one or more, e.g., three, 2′-O-methyl modifications at the 3′ end of said nucleic acid molecule or molecules;
d) one or more, e.g., three, 2′-O-methyl modifications at the 5′ end of said nucleic acid molecule or molecules;
e) a 2′ O-methyl modification at each of the 4^{th}-to-terminal, 3^{rd}-to-terminal, and 2^{nd}-to-terminal 3′ residues of said nucleic acid molecule or molecules;
f) a 2′ O-methyl modification at each of the 4^{th}-to-terminal, 3^{rd}-to-terminal, and 2^{nd}-to-terminal 5′ residues of said nucleic acid molecule or molecules; or
f) any combination thereof.

41. A gRNA molecule of claim 1, comprising, e.g., consisting of, the sequence:
(a) SEQ ID NO: 342;
(b) SEQ ID NO: 343; or
(c) SEQ ID NO: 1762.

42. A gRNA molecule of claim 1, comprising, e.g., consisting of:
(a) a crRNA comprising, e.g., consisting of, SEQ ID NO: 344, and a tracr comprising, e.g., consisting of, SEQ ID NO: 6660;
(b) a crRNA comprising, e.g., consisting of, SEQ ID NO: 344, and a tracr comprising, e.g., consisting of, SEQ ID NO: 346;
(c) a crRNA comprising, e.g., consisting of, SEQ ID NO: 345, and a tracr comprising, e.g., consisting of, SEQ ID NO: 6660; or
(d) a crRNA comprising, e.g., consisting of, SEQ ID NO: 345, and a tracr comprising, e.g., consisting of, SEQ ID NO: 346.

43. A gRNA molecule of claim 1, comprising, e.g., consisting of, the sequence:
(a) SEQ ID NO: 347;
(b) SEQ ID NO: 348; or
(c) SEQ ID NO: 1763.

44. A gRNA molecule of claim 1, comprising, e.g., consisting of:
(a) a crRNA comprising, e.g., consisting of, SEQ ID NO: 349, and a tracr comprising, e.g., consisting of, SEQ ID NO: 6660;
(b) a crRNA comprising, e.g., consisting of, SEQ ID NO: 349, and a tracr comprising, e.g., consisting of, SEQ ID NO: 346;
(c) a crRNA comprising, e.g., consisting of, SEQ ID NO: 350, and a tracr comprising, e.g., consisting of, SEQ ID NO: 6660; or
(d) a crRNA comprising, e.g., consisting of, SEQ ID NO: 350, and a tracr comprising, e.g., consisting of, SEQ ID NO: 346.

45. A gRNA molecule of claim 1, comprising, e.g., consisting of, the sequence:
(a) SEQ ID NO: 351;
(b) SEQ ID NO: 352; or
(c) SEQ ID NO: 1764.

46. A gRNA molecule of claim 1, comprising, e.g., consisting of:
(a) a crRNA comprising, e.g., consisting of, SEQ ID NO: 353, and a tracr comprising, e.g., consisting of, SEQ ID NO: 6660;
(b) a crRNA comprising, e.g., consisting of, SEQ ID NO: 353, and a tracr comprising, e.g., consisting of, SEQ ID NO: 346;
(c) a crRNA comprising, e.g., consisting of, SEQ ID NO: 354, and a tracr comprising, e.g., consisting of, SEQ ID NO: 6660; or
(d) a crRNA comprising, e.g., consisting of, SEQ ID NO: 354, and a tracr comprising, e.g., consisting of, SEQ ID NO: 346.

47. A gRNA molecule of claim 1, comprising, e.g., consisting of, the sequence:
(a) SEQ ID NO: 355;
(b) SEQ ID NO: 356; or
(c) SEQ ID NO: 1765.

48. A gRNA molecule of claim 1, comprising, e.g., consisting of:
(a) a crRNA comprising, e.g., consisting of, SEQ ID NO: 357, and a tracr comprising, e.g., consisting of, SEQ ID NO: 6660;
(b) a crRNA comprising, e.g., consisting of, SEQ ID NO: 357, and a tracr comprising, e.g., consisting of, SEQ ID NO: 346;
(c) a crRNA comprising, e.g., consisting of, SEQ ID NO: 358, and a tracr comprising, e.g., consisting of, SEQ ID NO: 6660; or
(d) a crRNA comprising, e.g., consisting of, SEQ ID NO: 358, and a tracr comprising, e.g., consisting of, SEQ ID NO: 346.

49. A gRNA molecule of claim 1, comprising, e.g., consisting of, the sequence:
(a) SEQ ID NO: 359;
(b) SEQ ID NO: 360; or
(c) SEQ ID NO: 1766.

50. A gRNA molecule of claim 1, comprising, e.g., consisting of:
(a) a crRNA comprising, e.g., consisting of, SEQ ID NO: 361, and a tracr comprising, e.g., consisting of, SEQ ID NO: 6660;
(b) a crRNA comprising, e.g., consisting of, SEQ ID NO: 361, and a tracr comprising, e.g., consisting of, SEQ ID NO: 346;
(c) a crRNA comprising, e.g., consisting of, SEQ ID NO: 362, and a tracr comprising, e.g., consisting of, SEQ ID NO: 6660; or
(d) a crRNA comprising, e.g., consisting of, SEQ ID NO: 362, and a tracr comprising, e.g., consisting of, SEQ ID NO: 346.

51. A gRNA molecule of claim 1, comprising, e.g., consisting of, the sequence:
(a) SEQ ID NO: 363;
(b) SEQ ID NO: 364; or
(c) SEQ ID NO: 1767.

52. A gRNA molecule of claim 1, comprising, e.g., consisting of:
(a) a crRNA comprising, e.g., consisting of, SEQ ID NO: 365, and a tracr comprising, e.g., consisting of, SEQ ID NO: 6660;
(b) a crRNA comprising, e.g., consisting of, SEQ ID NO: 365, and a tracr comprising, e.g., consisting of, SEQ ID NO: 346;
(c) a crRNA comprising, e.g., consisting of, SEQ ID NO: 366, and a tracr comprising, e.g., consisting of, SEQ ID NO: 6660; or
(d) a crRNA comprising, e.g., consisting of, SEQ ID NO: 366, and a tracr comprising, e.g., consisting of, SEQ ID NO: 346.

53. A gRNA molecule of claim 1, comprising, e.g., consisting of, the sequence:
(a) SEQ ID NO: 367;
(b) SEQ ID NO: 368; or
(c) SEQ ID NO: 1768.

54. A gRNA molecule of claim 1, comprising, e.g., consisting of:
(a) a crRNA comprising, e.g., consisting of, SEQ ID NO: 369, and a tracr comprising, e.g., consisting of, SEQ ID NO: 6660;
(b) a crRNA comprising, e.g., consisting of, SEQ ID NO: 369, and a tracr comprising, e.g., consisting of, SEQ ID NO: 346;
(c) a crRNA comprising, e.g., consisting of, SEQ ID NO: 370, and a tracr comprising, e.g., consisting of, SEQ ID NO: 6660; or
(d) a crRNA comprising, e.g., consisting of, SEQ ID NO: 370, and a tracr comprising, e.g., consisting of, SEQ ID NO: 346.

55. A gRNA molecule of claim 1, comprising, e.g., consisting of, the sequence:
(a) SEQ ID NO: 371;
(b) SEQ ID NO: 372; or
(c) SEQ ID NO: 1769.

56. A gRNA molecule of claim 1, comprising, e.g., consisting of:
(a) a crRNA comprising, e.g., consisting of, SEQ ID NO: 373, and a tracr comprising, e.g., consisting of, SEQ ID NO: 6660;
(b) a crRNA comprising, e.g., consisting of, SEQ ID NO: 373, and a tracr comprising, e.g., consisting of, SEQ ID NO: 346;
(c) a crRNA comprising, e.g., consisting of, SEQ ID NO: 374, and a tracr comprising, e.g., consisting of, SEQ ID NO: 6660; or
(d) a crRNA comprising, e.g., consisting of, SEQ ID NO: 374, and a tracr comprising, e.g., consisting of, SEQ ID NO: 346.

57. A gRNA molecule of claim 1, comprising, e.g., consisting of, the sequence:
(a) SEQ ID NO: 375;
(b) SEQ ID NO: 376; or
(c) SEQ ID NO: 1770.

58. A gRNA molecule of claim 1, comprising, e.g., consisting of:
(a) a crRNA comprising, e.g., consisting of, SEQ ID NO: 377, and a tracr comprising, e.g., consisting of, SEQ ID NO: 6660;
(b) a crRNA comprising, e.g., consisting of, SEQ ID NO: 377, and a tracr comprising, e.g., consisting of, SEQ ID NO: 346;
(c) a crRNA comprising, e.g., consisting of, SEQ ID NO: 378, and a tracr comprising, e.g., consisting of, SEQ ID NO: 6660; or
(d) a crRNA comprising, e.g., consisting of, SEQ ID NO: 378, and a tracr comprising, e.g., consisting of, SEQ ID NO: 346.

59. A gRNA molecule of claim 1, comprising, e.g., consisting of, the sequence:
(a) SEQ ID NO: 379;
(b) SEQ ID NO: 380; or
(c) SEQ ID NO: 1771.

60. A gRNA molecule of claim 1, comprising, e.g., consisting of:
(a) a crRNA comprising, e.g., consisting of, SEQ ID NO: 381, and a tracr comprising, e.g., consisting of, SEQ ID NO: 6660;
(b) a crRNA comprising, e.g., consisting of, SEQ ID NO: 381, and a tracr comprising, e.g., consisting of, SEQ ID NO: 346;
(c) a crRNA comprising, e.g., consisting of, SEQ ID NO: 382, and a tracr comprising, e.g., consisting of, SEQ ID NO: 6660; or
(d) a crRNA comprising, e.g., consisting of, SEQ ID NO: 382, and a tracr comprising, e.g., consisting of, SEQ ID NO: 346.

61. A gRNA molecule of claim 1, comprising, e.g., consisting of, the sequence:
(a) SEQ ID NO: 383;
(b) SEQ ID NO: 384; or
(c) SEQ ID NO: 1772.

62. A gRNA molecule of claim 1, comprising, e.g., consisting of:
(a) a crRNA comprising, e.g., consisting of, SEQ ID NO: 385, and a tracr comprising, e.g., consisting of, SEQ ID NO: 6660;
(b) a crRNA comprising, e.g., consisting of, SEQ ID NO: 385, and a tracr comprising, e.g., consisting of, SEQ ID NO: 346;
(c) a crRNA comprising, e.g., consisting of, SEQ ID NO: 386, and a tracr comprising, e.g., consisting of, SEQ ID NO: 6660; or
(d) a crRNA comprising, e.g., consisting of, SEQ ID NO: 386, and a tracr comprising, e.g., consisting of, SEQ ID NO: 346.

63. A gRNA molecule of claim 1, comprising, e.g., consisting of, the sequence:
(a) SEQ ID NO: 387;
(b) SEQ ID NO: 388; or
(c) SEQ ID NO: 1773.

64. A gRNA molecule of claim 1, comprising, e.g., consisting of:
(a) a crRNA comprising, e.g., consisting of, SEQ ID NO: 389, and a tracr comprising, e.g., consisting of, SEQ ID NO: 6660;
(b) a crRNA comprising, e.g., consisting of, SEQ ID NO: 389, and a tracr comprising, e.g., consisting of, SEQ ID NO: 346;
(c) a crRNA comprising, e.g., consisting of, SEQ ID NO: 390, and a tracr comprising, e.g., consisting of, SEQ ID NO: 6660; or
(d) a crRNA comprising, e.g., consisting of, SEQ ID NO: 390, and a tracr comprising, e.g., consisting of, SEQ ID NO: 346.

65. A gRNA molecule of claim 1, comprising, e.g., consisting of, the sequence:
(a) SEQ ID NO: 391;
(b) SEQ ID NO: 392; or
(c) SEQ ID NO: 1774.

66. A gRNA molecule of claim 1, comprising, e.g., consisting of:
(a) a crRNA comprising, e.g., consisting of, SEQ ID NO: 393, and a tracr comprising, e.g., consisting of, SEQ ID NO: 6660;
(b) a crRNA comprising, e.g., consisting of, SEQ ID NO: 393, and a tracr comprising, e.g., consisting of, SEQ ID NO: 346;
(c) a crRNA comprising, e.g., consisting of, SEQ ID NO: 394, and a tracr comprising, e.g., consisting of, SEQ ID NO: 6660; or
(d) a crRNA comprising, e.g., consisting of, SEQ ID NO: 394, and a tracr comprising, e.g., consisting of, SEQ ID NO: 346.

67. A gRNA molecule of claim 1, comprising, e.g., consisting of, the sequence:
(a) SEQ ID NO: 395;
(b) SEQ ID NO: 396; or
(c) SEQ ID NO: 1775.

68. A gRNA molecule of claim 1, comprising, e.g., consisting of:
(a) a crRNA comprising, e.g., consisting of, SEQ ID NO: 397, and a tracr comprising, e.g., consisting of, SEQ ID NO: 6660;
(b) a crRNA comprising, e.g., consisting of, SEQ ID NO: 397, and a tracr comprising, e.g., consisting of, SEQ ID NO: 346;
(c) a crRNA comprising, e.g., consisting of, SEQ ID NO: 398, and a tracr comprising, e.g., consisting of, SEQ ID NO: 6660; or
(d) a crRNA comprising, e.g., consisting of, SEQ ID NO: 398, and a tracr comprising, e.g., consisting of, SEQ ID NO: 346.

69. A gRNA molecule of any of claims 1-68, wherein when a CRISPR system (e.g., an RNP as described herein) comprising the gRNA molecule is introduced into a cell, an indel is formed at or near the target sequence complementary to the targeting domain of the gRNA molecule.

70. The gRNA molecule of claim 69, wherein the indel does not comprise a nucleotide of a GATA-1 or TAL-1 binding site.

71. A gRNA molecule of any of claims 1-70, wherein when a CRISPR system (e.g., an RNP as described herein) comprising the gRNA molecule is introduced into a population of cells, an indel is formed at or near the target sequence complementary to the targeting domain of the gRNA molecule in at least about 40%, e.g., at least about 50%, e.g., at least about 60%, e.g., at least about 70%, e.g., at least about 80%, e.g., at least about 90%, e.g., at least about 95%, e.g., at least about 96%, e.g., at least about 97%, e.g., at least about 98%, e.g., at least about 99%, of the cells of the population.

72. A gRNA molecule of any of claims 1-68, wherein when a CRISPR system (e.g., an RNP as described herein) comprising the gRNA molecule is introduced into a population of cells, an indel that does not comprise a nucleotide of a GATA-1 or TAL-1 binding site is formed at or near the target sequence complementary to the targeting domain of the gRNA molecule in at least about 20%, e.g., at least about 30%, e.g., at least about 35%, e.g., at least about 40%, e.g., at least about 45%, e.g., at least about 50%, e.g., at least about 55%, e.g., at least about 60%, e.g., at least about 65%, e.g., at least about 70%, e.g., at least about 75%, e.g., at least about 80%, e.g., at least about 85%, e.g., at least about 90%, e.g., at least about 95%, e.g., at least about 99%, of the cells of the population.

73. The gRNA molecule of any of claims 71-72, wherein in at least about 30%, e.g., least about 40%, e.g., at least about 50%, e.g., at least about 60%, e.g., at least about 70%, e.g., at least about 80%, e.g., at least about 90%, e.g., at least about 95%, e.g., at least about 96%, e.g., at least about 97%, e.g., at least about 98%, e.g., at least about 99%, of the cells of the population, the indel is an indel listed in any of FIG. 25, Table 15, Table 26, Table 27 or Table 37.

74. The gRNA molecule of any of claims 71-73, wherein the three most frequently detected indels in said population of cells comprise the indels associated with any gRNA molecule listed in any of FIG. 25, Table 15, Table 26, Table 27 or Table 37.

75. The gRNA molecule of any of claims 69-74, wherein the indel is as measured by next generation sequencing (NGS).

76. A gRNA molecule of any of claims 1-75, wherein when a CRISPR system (e.g., an RNP as described herein) comprising the gRNA molecule is introduced into a cell, expression of fetal hemoglobin is increased in said cell or its progeny, e.g., its erythroid progeny, e.g., its red blood cell progeny.

77. A gRNA molecule of claim 76, wherein expression of fetal hemoglobin is increased in said cell or its progeny, e.g., its erythroid progeny, e.g., its red blood cell progeny, by at least about 20%, e.g., at least about 30%, e.g., at least about 40%, e.g., at least about 50%, e.g., at least about 60%, e.g., at least about 70%, e.g., at least about 80%, e.g., at least about 90%, e.g., at least about 95%, e.g., at least about 96%, e.g., at least about 97%, e.g., at least about 98%, e.g., at least about 99%.

78. A gRNA molecule of any of claims 76-77, wherein said cell or its progeny, e.g., its erythroid progeny, e.g., its red blood cell progeny, produces at least about 6 picograms (e.g., at least about 7 picograms, at least about 8 picograms, at least about 9 picograms, at least about 10 picograms, or from about 8 to about 9 picograms, or from about 9 to about 10 picograms) fetal hemoglobin per cell.

79. The gRNA molecule of any of claims 1-78, wherein when a CRISPR system (e.g., an RNP as described herein) comprising the gRNA molecule is introduced into a cell, no off-target indels are formed in said cell, e.g., as detectible by next generation sequencing and/or a nucleotide insertional assay.

80. The gRNA molecule of any of claims 1-78, wherein when a CRISPR system (e.g., an RNP as described herein) comprising the gRNA molecule is introduced into a population of cells, no off-target indel is detected in more than about 5%, e.g., more than about 1%, e.g., more than about 0.1%, e.g., more than about 0.01%, of the cells of the population of cells, e.g., as detectible by next generation sequencing and/or a nucleotide insertional assay.

81. The gRNA molecule of any of claims 69-80, wherein the cell is (or population of cells comprises) a mammalian, primate, or human cell, e.g., is a human cell.

82. The gRNA molecule of claim 81, wherein the cell is (or population of cells comprises) an HSPC.

83. The gRNA molecule of claim 82, wherein the HSPC is CD34+.

84. The gRNA molecule of claim 83, wherein the HSPC is CD34+CD90+.

85. The gRNA molecule of any of claims 69-84, wherein the cell is autologous with respect to a patient to be administered said cell.

86. The gRNA molecule of any of claims 69-84, wherein the cell is allogeneic with respect to a patient to be administered said cell.

87. A composition comprising:
1) one or more gRNA molecules (including a first gRNA molecule) of any of claims 1-86 and a Cas9 molecule;
2) one or more gRNA molecules (including a first gRNA molecule) of any of claims 1-86 and nucleic acid encoding a Cas9 molecule;
3) nucleic acid encoding one or more gRNA molecules (including a first gRNA molecule) of any of claims 1-86 and a Cas9 molecule;
4) nucleic acid encoding one or more gRNA molecules (including a first gRNA molecule) of any of claims 1-86 and nucleic acid encoding a Cas9 molecule; or
5) any of 1) to 4), above, and a template nucleic acid; or
6) any of 1) to 4) above, and nucleic acid comprising sequence encoding a template nucleic acid.

88. A composition comprising a first gRNA molecule of any of claims 1-86, further comprising a Cas9 molecule.

89. The composition of claim 87 or 88, wherein the Cas9 molecule is an active or inactive s. pyogenes Cas9.

90. The composition of claim 87-89, wherein the Cas9 molecule comprises SEQ ID NO: 6611.

91. The composition of claim 87-89, wherein the Cas9 molecule comprises, e.g., consists of:
(a) SEQ ID NO: 7821;
(b) SEQ ID NO: 7822;
(c) SEQ ID NO: 7823;
(d) SEQ ID NO: 7824;
(e) SEQ ID NO: 7825;
(f) SEQ ID NO: 7826;
(g) SEQ ID NO: 7827;
(h) SEQ ID NO: 7828;
(i) SEQ ID NO: 7829;
(j) SEQ ID NO: 7830; or
(k) SEQ ID NO: 7831.

92. The composition of any of claims 88-91, wherein the first gRNA molecule and Cas9 molecule are present in a ribonuclear protein complex (RNP).

93. The composition of any of claims 87-92, further comprising a second gRNA molecule; a second gRNA molecule and a third gRNA molecule; or a second gRNA molecule, optionally, a third gRNA molecule, and, optionally, a fourth gRNA molecule, wherein the second gRNA molecule, the optional third gRNA molecule, and the optional fourth gRNA molecule are a gRNA molecule of any of claims 1-68, and wherein each gRNA molecule of the composition is complementary to a different target sequence.

94. The composition of claim 93, wherein two or more of the first gRNA molecule, the second gRNA molecule, the optional third gRNA molecule, and the optional fourth gRNA molecule are complementary to target sequences within the same gene or region.

95. The composition of claim 93 or 94, wherein the first gRNA molecule, the second gRNA molecule, the optional third gRNA molecule, and the optional fourth gRNA molecule are complementary to target sequences not more than 20000 nucleotides, not more than 10000 nucleotides, not more than 6000, not more than 5000 nucleotides, not more than 4000, not more than 1000 nucleotides, not more than 500 nucleotides, not more than 400 nucleotides, not more than 300 nucleotides, not more than 200 nucleotides, not more than 100 nucleotides, not more than 90 nucleotides, not more than 80 nucleotides, not more than 70 nucleotides, not more than 60 nucleotides, not more than 50 nucleotides, not more than 40 nucleotides, not more than 30 nucleotides, not more than 20 nucleotides or not more than 10 nucleotides apart.

96. The composition of claim 93, wherein two or more of the first gRNA molecule, the second gRNA molecule, the optional third gRNA molecule, and the optional fourth gRNA molecule are complementary to target sequence within different genes or regions.

97. The composition of any of claims 94-95, comprising a first gRNA molecule and a second gRNA molecule, wherein the first gRNA molecule and second gRNA molecule are:
(a) independently selected from the gRNA molecules of claim 4, and are complementary to different target sequences;
(b) independently selected from the gRNA molecules of claim 5, and are complementary to different target sequences;
c) independently selected from the gRNA molecules of claim 6, and are complementary to different target sequences; or
(d) independently selected from the gRNA molecules of claim 7, and are complementary to different target sequences; or
(e) independently selected from the gRNA molecules of any of claims 41-56, and are complementary to different target sequences.

98. The composition of any of claims 94-95, comprising a first gRNA molecule and a second gRNA molecule, wherein the first gRNA molecule and second gRNA molecule are:
(a) independently selected from the gRNA molecules of claim 10, and are complementary to different target sequences; or
(b) independently selected from the gRNA molecules of claim 11, and are complementary to different target sequences.

99. The composition of any of claims 94-95, comprising a first gRNA molecule and a second gRNA molecule, wherein the first gRNA molecule and second gRNA molecule are:
(a) independently selected from the gRNA molecules of claim 13, and are complementary to different target sequences; or
(b) independently selected from the gRNA molecules of claim 14, and are complementary to different target sequences.

100. The composition of any of claims 94-96, comprising a first gRNA molecule and a second gRNA molecule, wherein the first gRNA molecule and second gRNA molecule are:
(a) independently selected from the gRNA molecules of claim 16, and are complementary to different target sequences;
(b) independently selected from the gRNA molecules of claim 17, and are complementary to different target sequences;
(c) independently selected from the gRNA molecules of claim 18, and are complementary to different target sequences; or
(d) independently selected from the gRNA molecules of any of claims 57-68, and are complementary to different target sequences.

101. The composition of any of claims 94-96, comprising a first gRNA molecule and a second gRNA molecule, wherein:
(1) the first gRNA molecule is: (a) selected from the gRNA molecules of claim 4, (b) selected from the gRNA molecules of claim 5, (c) selected from the gRNA molecules of claim 6, (d) selected from the gRNA molecules of claim 7, or (e) selected from the gRNA molecules of any of claims 41-56; and
(2) the second gRNA molecule is: (a) selected from the gRNA molecules of claim 10, or (b) selected from the gRNA molecules of claim 11.

102. The composition of any of claims 94-96, comprising a first gRNA molecule and a second gRNA molecule, wherein:
(1) the first gRNA molecule is: (a) selected from the gRNA molecules of claim 4, (b) selected from the gRNA molecules of claim 5, (c) selected from the gRNA molecules of claim 6, (d) selected from the gRNA molecules of claim 7, or (e) selected from the gRNA molecules of any of claims 41-56; and
(2) the second gRNA molecule is: (a) selected from the gRNA molecules of claim 13, (b) selected from the gRNA molecules of claim 14.

103. The composition of any of claims 94-96, comprising a first gRNA molecule and a second gRNA molecule, wherein:
(1) the first gRNA molecule is: (a) selected from the gRNA molecules of claim 4, (b) selected from the gRNA molecules of claim 5, (c) selected from the gRNA molecules of claim 6, (d) selected from the gRNA molecules of claim 7, or (e) selected from the gRNA molecules of any of claims 41-56; and
(2) the second gRNA molecule is: (a) selected from the gRNA molecules of claim 16, (b) selected from the gRNA molecules of claim 17, (c) selected from the gRNA molecules of claim 18, or (d) selected from the gRNA molecules of any of claims 57-68.

104. The composition of any of claims 94-96, comprising a first gRNA molecule and a second gRNA molecule, wherein:
(1) the first gRNA molecule is: (a) selected from the gRNA molecules of claim 10, or (b) selected from the gRNA molecules of claim 11; and
(2) the second gRNA molecule is: (a) selected from the gRNA molecules of claim 13, (b) selected from the gRNA molecules of claim 14.

105. The composition of any of claims 94-96, comprising a first gRNA molecule and a second gRNA molecule, wherein:
(1) the first gRNA molecule is: (a) selected from the gRNA molecules of claim 10, or (b) selected from the gRNA molecules of claim 11; and
(2) the second gRNA molecule is: (a) selected from the gRNA molecules of claim 16, (b) selected from the gRNA molecules of claim 17, (c) selected from the gRNA molecules of claim 18, or (d) selected from the gRNA molecules of any of claims 57-68.

106. The composition of any of claims 94-96, comprising a first gRNA molecule and a second gRNA molecule, wherein:
(1) the first gRNA molecule is: (a) selected from the gRNA molecules of claim 13, (b) selected from the gRNA molecules of claim 14; and
(2) the second gRNA molecule is: (a) selected from the gRNA molecules of claim 16, (b) selected from the gRNA molecules of claim 17, (c) selected from the gRNA molecules of claim 18, or (d) selected from the gRNA molecules of any of claims 57-68.

107. The composition of claim 96, comprising a first gRNA molecule and a second gRNA molecule, wherein:
(1) the first gRNA molecule is: (a) selected from the gRNA molecules of claim 16, (b) selected from the gRNA molecules of claim 17, (c) selected from the gRNA molecules of claim 18, or (d) selected from the gRNA molecules of any of claims 57-68; and (2) the second gRNA molecule comprises a targeting domain that is complementary to a target sequence of the beta globin gene; or
(1) the first gRNA molecule is: (a) selected from the gRNA molecules of claim 4, (b) selected from the gRNA molecules of claim 5, (c) selected from the gRNA molecules of claim 6, (d) selected from the gRNA molecules of claim 7, (e) selected from the gRNA molecules of any of claims 41-56, (f) selected from the gRNA molecules of claim 10, (g) selected from the gRNA molecules of claim 11, (h) selected from the gRNA molecules of claim 13, or (i) selected from the gRNA molecules of claim 14; and (2) the second gRNA molecule comprises a targeting domain that is complementary to a target sequence of the beta globin gene.

108. The composition of claim 94-96, wherein the first gRNA molecule and the second gRNA molecule are independently selected from the gRNA molecules of any of claims 41-68.

109. The composition of any of claims 87-108, wherein with respect to the gRNA molecule components of the composition, the composition consists of a first gRNA molecule and a second gRNA molecule.

110. The composition of any one of claims 87-109, wherein each of said gRNA molecules is in a ribonuclear protein complex (RNP) with a Cas9 molecule described herein, e.g., a Cas9 molecule of any of claim 90 or 91.

111. The composition of any of claims 87-110, comprising a template nucleic acid, wherein the template nucleic acid comprises a nucleotide that corresponds to a nucleotide at or near the target sequence of the first gRNA molecule.

112. The composition of any of claim 111, wherein the template nucleic acid comprises nucleic acid encoding:
(a) human beta globin, e.g., human beta globin comprising one or more of the mutations G16D, E22A and T87Q, or fragment thereof; or
(b) human gamma globin, or fragment thereof.

113. The composition of any of claims 87-112, formulated in a medium suitable for electroporation.

114. The composition of any of claims 87-113, wherein each of said gRNA molecules is in a RNP with a Cas9 molecule described herein, and wherein each of said RNP is at a concentration of less than about 10 uM, e.g., less than about 3 uM, e.g., less than about 1 uM, e.g., less than about 0.5 uM, e.g., less than about 0.3 uM, e.g., less than about 0.1 uM.

115. A nucleic acid sequence that encodes one or more gRNA molecules of any of claims 1-68.

116. The nucleic acid sequence of claim 115, wherein the nucleic acid comprises a promoter operably linked to the sequence that encodes the one or more gRNA molecules.

117. The nucleic acid sequence of claim 116, wherein the promoter is a promoter recognized by an RNA polymerase II or RNA polymerase III.

118. The nucleic acid sequence of claim 117, wherein the promoter is a U6 promoter or an HI promoter.

119. The nucleic acid sequence of any of claims 115-118, wherein the nucleic acid further encodes a Cas9 molecule.

120. The nucleic acid sequence of claim 119, wherein the Cas9 molecule comprises any of SEQ ID NO: 6611, SEQ ID NO: 7821, SEQ ID NO: 7822, SEQ ID NO: 7823, SEQ ID NO: 7824, SEQ ID NO: 7825, SEQ ID NO: 7826, SEQ ID NO: 7827, SEQ ID NO: 7828, SEQ ID NO: 7829, SEQ ID NO: 7830, or SEQ ID NO: 7831.

121. The nucleic acid sequence of any of claims 119-120, wherein said nucleic acid comprises a promoter operably linked to the sequence that encodes a Cas9 molecule.

122. The nucleic acid sequence of claim 121, wherein the promoter is an EF-1 promoter, a CMV IE gene promoter, an EF-1α promoter, an ubiquitin C promoter, or a phosphoglycerate kinase (PGK) promoter.

123. A vector comprising the nucleic acid of any of claims 115-122.

124. The vector of claim 123, wherein in the vector is selected from the group consisting of a lentiviral vector, an adenoviral vector, an adeno-associated viral (AAV) vector, a herpes simplex virus (HSV) vector, a plasmid, a minicircle, a nanoplasmid, and an RNA vector.

125. A method of altering a cell (e.g., a population of cells), (e.g., altering the structure (e.g., sequence) of nucleic acid) at or near a target sequence within said cell, comprising contacting (e.g., introducing into) said cell (e.g., population of cells) with:
1) one or more gRNA molecules of any of claims 1-68 and a Cas9 molecule;
2) one or more gRNA molecules of any of claims 1-68 and nucleic acid encoding a Cas9 molecule;
3) nucleic acid encoding one or more gRNA molecules of any of claims 1-68 and a Cas9 molecule;
4) nucleic acid encoding one or more gRNA molecules of any of claims 1-68 and nucleic acid encoding a Cas9 molecule;
5) any of 1) to 4), above, and a template nucleic acid;
6) any of 1) to 4) above, and nucleic acid comprising sequence encoding a template nucleic acid;
7) the composition of any of claims 87-114; or
8) the vector of any of claims 123-124.

126. The method of claim 125, wherein the gRNA molecule or nucleic acid encoding the gRNA molecule, and the Cas9 molecule or nucleic acid encoding the Cas9 molecule, are formulated in a single composition.

127. The method of claim 125, wherein the gRNA molecule or nucleic acid encoding the gRNA molecule, and the Cas9 molecule or nucleic acid encoding the Cas9 molecule, are formulated in more than one composition.

128. The method of claim 127, wherein the more than one composition are delivered simultaneously or sequentially.

129. The method of any of claims 125-128, wherein the cell is an animal cell.

130. The method of any of claims 125-128, wherein the cell is a mammalian, primate, or human cell.

131. The method of claim 130, wherein the cell is a hematopoietic stem or progenitor cell (HSPC) (e.g., a population of HSPCs).

132. The method of any of claims 125-131, wherein the cell is a CD34+ cell.

133. The method of any of claims 125-132, wherein the cell is a CD34+CD90+ cell.

134. The method of any of claims 125-133, wherein the cell is disposed in a composition comprising a population of cells that has been enriched for CD34+ cells.

135. The method of any of claims 125-134, wherein the cell (e.g. population of cells) has been isolated from bone marrow, mobilized peripheral blood, or umbilical cord blood.

136. The method of any of claims 125-135, wherein the cell is autologous or allogeneic with respect to a patient to be administered said cell.

137. The method of any of claims 125-136, wherein the altering results in an indel at or near a genomic DNA sequence complementary to the targeting domain of the one or more gRNA molecules.

138. The method of claim 137, wherein the indel is an indel shown on FIG. 25, Table 15, Table 26, Table 27 or Table 37.

139. The method of claim 137-138, wherein the indel is an insertion or deletion of less than about 40 nucleotides, e.g., less than 30 nucleotides, e.g., less than 20 nucleotides, e.g., less than 10 nucleotides.

140. The method of claim 139, wherein the indel is a single nucleotide deletion.

141. The method of any of claims 137-140, wherein the method results in a population of cells wherein at least about 50%, e.g., at least about 60%, e.g., at least about 70%, e.g., at least about 80%, e.g., at least about 90% (e.g., at least about 95%, at least about 96%, at least about 97%, at least about 98%, or at least about 99%) of the cells of the population have been altered, e.g., comprise an indel.

142. The method of any of claims 125-141, wherein the altering results in a cell (e.g., population of cells) that is capable of differentiating into a differentiated cell of an erythroid lineage (e.g., a red blood cell), and wherein said differentiated cell exhibits an increased level of fetal hemoglobin, e.g., relative to an unaltered cell (e.g., population of cells).

143. The method of any of claims 125-142, wherein the altering results in a population of cells that is capable of differentiating into a population of differentiated cells, e.g., a population of cells of an erythroid lineage (e.g., a population of red blood cells), and wherein said population of differentiated cells has an increased fraction of F cells (e.g., at least about 15%, at least about 20%, at least about 25%, at least about 30%, or at least about 40% higher) e.g., relative to a population of unaltered cells.

144. The method of any of claims 125-142, wherein the altering results in a cell that is capable of differentiating into a differentiated cell, e.g., a cell of an erythroid lineage (e.g., a red blood cell), and wherein said differentiated cell produces at least about 6 picograms (e.g., at least about 7 picograms, at least about 8 picograms, at least about 9 picograms, at least about 10 picograms, or from about 8 to about 9 picograms, or from about 9 to about 10 picograms) fetal hemoglobin per cell.

145. A cell, altered by the method of any of claims 125-144.

146. A cell, obtainable by the method of any of claims 125-144.

147. A cell, comprising a first gRNA molecule of any of claims 1-68, or a composition of any of claims 87-114, a nucleic acid of any of claims 115-122, or a vector of any of claims 123-124.

148. The cell of claim 147, comprising a Cas9 molecule.

149. The cell of claim 148, wherein the Cas9 molecule comprises any of SEQ ID NO: 6611, SEQ ID NO: 7821, SEQ ID NO: 7822, SEQ ID NO: 7823, SEQ ID NO: 7824, SEQ ID NO: 7825, SEQ ID NO: 7826, SEQ ID NO: 7827, SEQ ID NO: 7828, SEQ ID NO: 7829, SEQ ID NO: 7830, or SEQ ID NO: 7831.

150. The cell of any of claims 145-149, wherein the cell comprises, has comprised, or will comprise a second gRNA molecule of any of claims 1-68, or a nucleic acid encoding a second gRNA molecule of any of claims 1-68, wherein the first gRNA molecule and second gRNA molecule comprise nonidentical targeting domains.

151. The cell of any of claims 145-150, wherein expression of fetal hemoglobin is increased in said cell or its progeny (e.g., its erythroid progeny, e.g., its red blood cell progeny) relative to a cell or its progeny of the same cell type that has not been modified to comprise a gRNA molecule.

152. The cell of any of claims 145-150, wherein the cell is capable of differentiating into a differentiated cell, e.g., a cell of an erythroid lineage (e.g., a red blood cell), and wherein said differentiated cell exhibits an increased level of fetal hemoglobin, e.g., relative to a cell of the same type that has not been modified to comprise a gRNA molecule.

153. The cell of claim 152, wherein the differentiated cell (e.g., cell of an erythroid lineage, e.g., red blood cell) produces at least about 6 picograms (e.g., at least about 7 picograms, at least about 8 picograms, at least about 9 picograms, at least about 10 picograms, or from about 8 to about 9 picograms, or from about 9 to about 10 picograms) fetal hemoglobin, e.g., relative to a cell of the same type that has not been modified to comprise a gRNA molecule.

154. The cell of any of claims 145-153, that has been contacted with a stem cell expander.

155. The cell of claim 154, wherein the stem cell expander is compound 1, compound 2, compound 3, compound 4, or a combination thereof (e.g., compound 1 and compound 4).

156. The cell of claim 155, wherein the stem cell expander is compound 4.

157. A cell, e.g., a cell of any of claims 145-156, comprising an indel at or near a genomic DNA sequence complementary to the targeting domain of a gRNA molecule of any of claims 1-68.

158. The cell of claim 157, wherein the indel is an indel shown on FIG. 25, Table 15, Table 26, Table 27 or Table 37.

159. The cell of any of claims 157-158, wherein the indel is an insertion or deletion of less than about 40 nucleotides, e.g., less than 30 nucleotides, e.g., less than 20 nucleotides, e.g., less than 10 nucleotides.

160. The cell of any of claims 157-159, wherein the indel is a single nucleotide deletion.

161. The cell of any of claims 145-160, wherein the cell is an animal cell.

162. The cell of claim 161, wherein the cell is a mammalian, a primate, or a human cell.

163. The cell of any of claims 145-162, wherein the cell is a hematopoietic stem or progenitor cell (HSPC) (e.g., a population of HSPCs).

164. The cell of any of claims 145-163, wherein the cell is a CD34+ cell.

165. The cell of claim 164, wherein the cell is a CD34+CD90+ cell.

166. The cell of any of claims 145-165, wherein the cell (e.g. population of cells) has been isolated from bone marrow, mobilized peripheral blood, or umbilical cord blood.

167. The cell of any of claims 145-166, wherein the cell is autologous with respect to a patient to be administered said cell.

168. The cell of any of claims 145-166, wherein the cell is allogeneic with respect to a patient to be administered said cell.

169. A population of cells comprising the cell of any of claims 145-168.

170. The population of cells of claim 169, wherein at least about 50%, e.g., at least about 60%, e.g., at least about 70%, e.g., at least about 80%, e.g., at least about 90% (e.g., at least about 95%, at least about 96%, at least about 97%, at least about 98%, or at least about 99%) of the cells of the population are a cell according to any one of claims 145-168.

171. The population of cells of any of claims 169-170, wherein the population of cells is capable of differentiating into a population of differentiated cells, e.g., a population of cells of an erythroid lineage (e.g., a population of red blood cells), and wherein said population of differentiated cells has an increased fraction of F cells (e.g., at least about 15%, at least about 20%, at least about 25%, at least about 30%, or at least about 40% higher) e.g., relative to a population of unmodified cells of the same type.

172. The population of cells of claim 171, wherein the F cells of the population of differentiated cells produce an average of at least about 6 picograms (e.g., at least about 7 picograms, at least about 8 picograms, at least about 9 picograms, at least about 10 picograms, or from about 8 to about 9 picograms, or from about 9 to about 10 picograms) fetal hemoglobin per cell.

173. The population of cells of any of claims 169-172, comprising:
1) at least 1e6 CD34+ cells/kg body weight of the patient to whom the cells are to be administered;
2) at least 2e6 CD34+ cells/kg body weight of the patient to whom the cells are to be administered;
3) at least 3e6 CD34+ cells/kg body weight of the patient to whom the cells are to be administered;
4) at least 4e6 CD34+ cells/kg body weight of the patient to whom the cells are to be administered; or
5) from 2e6 to 10e6 CD34+ cells/kg body weight of the patient to whom the cells are to be administered.

174. The population of cells of any of claims 169-173, wherein at least about 40%, e.g., at least about 50%, (e.g., at least about 60%, at least about 70%, at least about 80%, or at least about 90%) of the cells of the population are CD34+ cells.

175. The population of cells of claim 174, wherein at least about 10%, e.g., at least about 15%, e.g., at least about 20%, e.g., at least about 30% of the cells of the population are CD34+CD90+ cells.

176. The population of cells of any of claims 169-175, wherein the population of cells is derived from bone marrow.

177. The population of cells of any of claims 169-176, wherein the population of cells comprises, e.g., consists of, mammalian cells, e.g., human cells.

178. The population of cells of any of claims 169-177, wherein the population of cells is autologous relative to a patient to which it is to be administered.

179. The population of cells of any of claims 169-177, wherein the population of cells is allogeneic relative to a patient to which it is to be administered.

180. A composition comprising a cell of any of claims 145-168, or the population of cells of any of claims 169-179.

181. The composition of claim 180, comprising a pharmaceutically acceptable medium, e.g., a pharmaceutically acceptable medium suitable for cryopreservation.

182. A method of treating a hemoglobinopathy, comprising administering to a patient a cell of any of claims 145-168, a population of cells of any of claims 169-179, or a composition of any of claims 180-181.

183. A method of increasing fetal hemoglobin expression in a mammal, comprising administering to a patient a cell of any of claims 145-168, a population of cells of any of claims 169-179, or a composition of any of claims 180-181.

184. The method of claim 182, wherein the hemoglobinopathy is beta-thalassemia or sickle cell disease.

185. A method of preparing a cell (e.g., a population of cells) comprising:
(a) providing a cell (e.g., a population of cells) (e.g., a HSPC (e.g., a population of HSPCs));
(b) culturing said cell (e.g., said population of cells) ex vivo in a cell culture medium comprising a stem cell expander; and
(c) introducing into said cell a first gRNA molecule of any of claims 1-68, a nucleic acid molecule encoding a first gRNA molecule of any of claims 1-68, a composition of any of claims 87-114, a nucleic acid of any of claims 115-122, or a vector of any of claims 123-124.

186. The method of claim 185, wherein after said introducing of step (c), said cell (e.g., population of cells) is capable of differentiating into a differentiated cell (e.g., population of differentiated cells), e.g., a cell of an erythroid lineage (e.g., population of cells of an erythroid lineage), e.g., a red blood cell (e.g., a population of red blood cells), and wherein said differentiated cell (e.g., population of differentiated cells) produces increased fetal hemoglobin, e.g., relative to the same cells which have not been subjected to step (c).

187. The method of any of claims 185-186, wherein the stem cell expander is compound 1, compound 2, compound 3, compound 4 or a combination thereof (e.g., compound 1 and compound 4).

188. The method of claim 187, wherein the stem cell expander is compound 4.

189. The method of any of claims 185-188, wherein the cell culture medium comprises thrombopoietin (Tpo), Flt3 ligand (Flt-3L), and human stem cell factor (SCF).

190. The method of claim 189, wherein the cell culture medium further comprises human interleukin-6 (IL-6).

191. The method of claim 189-190, wherein the cell culture medium comprises thrombopoietin (Tpo), Flt3 ligand (Flt-3L), and human stem cell factor (SCF) each at a concentration ranging from about 10 ng/mL to about 1000 ng/mL.

192. The method of claim 191, wherein the cell culture medium comprises thrombopoietin (Tpo), Flt3 ligand (Flt-3L), and human stem cell factor (SCF) each at a concentration of about 50 ng/mL, e.g, at a concentration of 50 ng/mL.

193. The method of any of claims 190-192, wherein the cell culture medium comprises human interleukin-6 (IL-6) at a concentration ranging from about 10 ng/mL to about 1000 ng/mL.

194. The method of claim 193, wherein the cell culture medium comprises human interleukin-6 (IL-6) at a concentration of about 50 ng/mL, e.g, at a concentration of 50 ng/mL.

195. The method of any of claims 185-194, wherein the cell culture medium comprises a stem cell expander at a concentration ranging from about 1 nM to about 1 mM.

196. The method of claim 195, wherein the cell culture medium comprises a stem cell expander at a concentration ranging from about 1 uM to about 100 uM.

197. The method of claim 196, wherein the cell culture medium comprises a stem cell expander at a concentration ranging from about 50 uM to about 75 uM.

198. The method of claim 197, wherein the cell culture medium comprises a stem cell expander at a concentration of about 50 uM, e.g., at a concentration of 50 uM.

199. The method of claim 197, wherein the cell culture medium comprises a stem cell expander at a concentration of about 75 uM, e.g., at a concentration of 75 uM.

200. The method of any of claims 185-199, wherein the culturing of step (b) comprises a period of culturing before the introducing of step (c).

201. The method of claim 200, wherein the period of culturing before the introducing of step (c) is at least 12 hours, e.g., is for a period of about 1 day to about 3 days, e.g., is for a period of about 1 day to about 2 days, e.g., is for a period of about 2 days.

202. The method of any of claims 185-201, wherein the culturing of step (b) comprises a period of culturing after the introducing of step (c).

203. The method of claim 202, wherein the period of culturing after the introducing of step (c) is at least 12 hours, e.g., is for a period of about 1 day to about 10 days, e.g., is for a period of about 1 day to about 5 days, e.g., is for a period of about 2 days to about 4 days, e.g., is for a period of about 2 days or is for a period of about 3 days or is for a period of about 4 days.

204. The method of any of claims 185-203, wherein the population of cells is expanded at least 4-fold, e.g., at least 5-fold, e.g, at least 10-fold, e.g., relative to cells which are not cultured according to step (b).

205. The method of any of claims 185-204, wherein the introducing of step (c) comprises an electroporation.

206. The method of claim 205, wherein the electroporation comprises 1 to 5 pulses, e.g., 1 pulse, and wherein each pulse is at a pulse voltage ranging from 700 volts to 2000 volts and has a pulse duration ranging from 10 ms to 100 ms.

207. The method of claim 206, wherein the electroporation comprises 1 pulse.

208. The method of any of claims 206-207, wherein the pulse voltage ranges from 1500 to 1900 volts, e.g., is 1700 volts.

209. The method of any of claims 206-208, wherein the pulse duration ranges from 10 ms to 40 ms, e.g., is 20 ms.

210. The method of any of claims 185-209, wherein the cell (e.g., population of cells) provided in step (a) is a human cell (e.g., a population of human cells).

211. The method of claim 210, wherein the cell (e.g., population of cells) provided in step (a) is isolated from bone marrow, peripheral blood (e.g., mobilized peripheral blood) or umbilical cord blood.

212. The method of claim 211, wherein the cell (e.g., population of cells) provided in step (a) is isolated from bone marrow, e.g., is isolated from bone marrow of a patient suffering from a hemoglobinopathy.

213. The method of any of claims 185-212, wherein the population of cells provided in step (a) is enriched for CD34+ cells.

214. The method of any of claims 185-213, wherein subsequent to the introducing of step (c), the cell (e.g., population of cells) is cryopreserved.

215. The method of any of claims 185-214, wherein subsequent to the introducing of step (c), the cell (e.g., population of cells) comprises an indel at or near a genomic DNA sequence complementary to the targeting domain of the first gRNA molecule.

216. The method of any of claim 132, wherein the indel is an indel shown on FIG. 25, Table 15, Table 26, Table 27 or Table 37.

217. The method of any of claims 185-216, wherein after the introducing of step (c), at least about 50%, at least about 60%, at least about 70%, at least about 80%, at least about 90%, at least about 95%, at least about 96%, at least about 97%, at least about 98% or at least about 99% of the cells of the population of cells comprise an indel at or near a genomic DNA sequence complementary to the targeting domain of the first gRNA molecule.

218. The method of claim 217, wherein the indel in each of said cells of the population of cells is an indel shown in FIG. 25, Table 15, Table 26, Table 27 or Table 37.

219. A cell (e.g., population of cells), obtainable by the method of any of claims 185-218.

220. A method of treating a hemoglobinopathy, comprising administering to a human patient a composition comprising a cell (e.g., a population of cells) of claim 219.

221. A method of increasing fetal hemoglobin expression in a human patient, comprising administering to said human patient a composition comprising a cell (e.g., a population of cells) of claim 219.

222. The method of claim 220, wherein the hemoglobinopathy is beta-thalassemia or sickle cell disease.

223. The method of any of claims 220-222, wherein the human patient is administered a composition comprising at least about 1e6 cells of claim 219 per kg body weight of the human patient, e.g., at least about 1e6 CD34+ cells of claim 219 per kg body weight of the human patient.

224. The method claim 223, wherein the human patient is administered a composition comprising at least about 2e6 cells of claim 219 per kg body weight of the human patient, e.g., at least about 2e6 CD34+ cells of claim 219 per kg body weight of the human patient.

225. The method claim 223, wherein the human patient is administered a composition comprising from about 2e6 to about 10e6 cells of claim 219 per kg body weight of the human patient, e.g., at least about 2e6 to about 10e6 CD34+ cells of claim 219 per kg body weight of the human patient.

226. A gRNA molecule of any of claims 1-86, a composition of any of claim 87-114 or 180-181, a nucleic acid of any of claims 115-122, a vector of any of claims 123-124, a cell of any of claim 145-168 or 219, or a population of cells of any of claims 169-179, for use as a medicament.

227. A gRNA molecule of any of claims 1-86, a composition of any of claim 87-114 or 180-181, a nucleic acid of any of claims 115-122, a vector of any of claims 123-124, a cell of any of claim 145-168 or 219, or a population of cells of any of claims 169-179, for use in the manufacture of a medicament.

228. A gRNA molecule of any of claims 1-86, a composition of any of claim 87-114 or 180-181, a nucleic acid of any of claims 115-122, a vector of any of claims 123-124, a cell of any of claim 145-168 or 219, or a population of cells of any of claims 169-179, for use in the treatment of a disease.

229. A gRNA molecule of any of claims 1-86, a composition of any of claim 87-114 or 180-181, a nucleic acid of any of claims 115-122, a vector of any of claims 123-124, a cell of any of claim 145-168 or 219, or a population of cells of any of claims 169-179, for use in the treatment of a disease, wherein the disease is a hemoglobinopathy.

230. A gRNA molecule of any of claims 1-86, a composition of any of claim 87-114 or 180-181, a nucleic acid of any of claims 115-122, a vector of any of claims 123-124, a cell of any of claim 145-168 or 219, or a population of cells of any of claims 169-179, for use in the treatment of a disease, wherein the hemoglobinopathy is beta-thalassemia or sickle cell disease.

The application's sequence listing, which the Patent Office published only in electronic form, follows.

SEQUENCE LISTING (7831 sequences)

SEQ ID NO: 1 - RNA, 20 nt, Artificial Sequence
  source: /note="Description of Artificial Sequence: Synthetic oligonucleotide"
acaggccgugaaccuaagug

SEQ ID NO: 2 - RNA, 20 nt, Artificial Sequence
  source: /note="Description of Artificial Sequence: Synthetic oligonucleotide"
uagaggggggaaauuauagg

SEQ ID NO: 3 - RNA, 20 nt, Artificial Sequence
  source: /note="Description of Artificial Sequence: Synthetic oligonucleotide"
cgagcgguaaauccuaaaga

SEQ ID NO: 4 - RNA, 20 nt, Artificial Sequence
  source: /note="Description of Artificial Sequence: Synthetic oligonucleotide"
agacaaauucaaauccugca

SEQ ID NO: 5 - RNA, 20 nt, Artificial Sequence
  source: /note="Description of Artificial Sequence: Synthetic oligonucleotide"
gcuuuugguggcuaccaugc

SEQ ID NO: 6 - RNA, 20 nt, Artificial Sequence
  source: /note="Description of Artificial Sequence: Synthetic oligonucleotide"
aauuuaugccaucugauaag

SEQ ID NO: 7 - RNA, 20 nt, Artificial Sequence
  source: /note="Description of Artificial Sequence: Synthetic oligonucleotide"
uguuccuccuacccacccga

SEQ ID NO: 8 - RNA, 20 nt, Artificial Sequence
  source: /note="Description of Artificial Sequence: Synthetic oligonucleotide"
auaaauguuggagcuuuagg

SEQ ID NO: 9 - RNA, 20 nt, Artificial Sequence
  source: /note="Description of Artificial Sequence: Synthetic oligonucleotide"
caaccuaauuaccuguauug

SEQ ID NO: 10 - RNA, 20 nt, Artificial Sequence
  source: /note="Description of Artificial Sequence: Synthetic oligonucleotide"
cgcugucaugagugaugccc

SEQ ID NO: 11 - RNA, 20 nt, Artificial Sequence
  source: /note="Description of Artificial Sequence: Synthetic oligonucleotide"
ggcaucacucaugacagcga

SEQ ID NO: 12 - RNA, 20 nt, Artificial Sequence
  source: /note="Description of Artificial Sequence: Synthetic oligonucleotide"
agucccauagagagggcccg

SEQ ID NO: 13 - RNA, 20 nt, Artificial Sequence
  source: /note="Description of Artificial Sequence: Synthetic oligonucleotide"
acugauucacuguuccaaug

SEQ ID NO: 14 - RNA, 20 nt, Artificial Sequence
  source: /note="Description of Artificial Sequence: Synthetic oligonucleotide"
aggacucugucuucgcacaa

SEQ ID NO: 15 - RNA, 20 nt, Artificial Sequence
  source: /note="Description of Artificial Sequence: Synthetic oligonucleotide"
ccacgcugacgucgacuggg

SEQ ID NO: 16 - RNA, 20 nt, Artificial Sequence
  source: /note="Description of Artificial Sequence: Synthetic oligonucleotide"
guucuucacacacccccauu

SEQ ID NO: 17 - RNA, 20 nt, Artificial Sequence
  source: /note="Description of Artificial Sequence: Synthetic oligonucleotide"
gcgcuucuccacaccgcccg

SEQ ID NO: 18 - RNA, 20 nt, Artificial Sequence
  source: /note="Description of Artificial Sequence: Synthetic oligonucleotide"
gucuggagucuccgaagcua

SEQ ID NO: 19 - RNA, 20 nt, Artificial Sequence
  source: /note="Description of Artificial Sequence: Synthetic oligonucleotide"
aaagaucccuuccuuagcuu

SEQ ID NO: 20 - RNA, 20 nt, Artificial Sequence
  source: /note="Description of Artificial Sequence: Synthetic oligonucleotide"
ucgccggcuacgcggccucc

SEQ ID NO: 21 - RNA, 20 nt, Artificial Sequence
  source: /note="Description of Artificial Sequence: Synthetic oligonucleotide"
cggagaacguguacucgcag

SEQ ID NO: 22 - RNA, 20 nt, Artificial Sequence
  source: /note="Description of Artificial Sequence: Synthetic oligonucleotide"
gagcuugaugcgcuuagaga

SEQ ID NO: 23 - RNA, 20 nt, Artificial Sequence
  source: /note="Description of Artificial Sequence: Synthetic oligonucleotide"
ccccccgaggccgacucgcc

SEQ ID NO: 24 - RNA, 20 nt, Artificial Sequence
  source: /note="Description of Artificial Sequence: Synthetic oligonucleotide"
caccaugcccugcaugacgu

SEQ ID NO: 25 - RNA, 20 nt, Artificial Sequence
  source: /note="Description of Artificial Sequence: Synthetic oligonucleotide"
gagagcgagaggguggacua

SEQ ID NO: 26 - RNA, 20 nt, Artificial Sequence
  source: /note="Description of Artificial Sequence: Synthetic oligonucleotide"
cacggacuugagcgcgcugc

SEQ ID NO: 27 - RNA, 20 nt, Artificial Sequence
  source: /note="Description of Artificial Sequence: Synthetic oligonucleotide"
gcccaccaagucgcuggugc

SEQ ID NO: 28 - RNA, 20 nt, Artificial Sequence
  source: /note="Description of Artificial Sequence: Synthetic oligonucleotide"
cccaccaagucgcuggugcc

SEQ ID NO: 29 - RNA, 20 nt, Artificial Sequence
  source: /note="Description of Artificial Sequence: Synthetic oligonucleotide"
ggcgguggagagaccgucgu

SEQ ID NO: 30 - RNA, 20 nt, Artificial Sequence
  source: /note="Description of Artificial Sequence: Synthetic oligonucleotide"
gccgcagaacucgcaugacu

SEQ ID NO: 31 - RNA, 20 nt, Artificial Sequence
  source: /note="Description of Artificial Sequence: Synthetic oligonucleotide"
ccgcccccaggcgcucuaug

SEQ ID NO: 32 - RNA, 20 nt, Artificial Sequence
  source: /note="Description of Artificial Sequence: Synthetic oligonucleotide"
uggggguccaagugaugucu

SEQ ID NO: 33 - RNA, 20 nt, Artificial Sequence
  source: /note="Description of Artificial Sequence: Synthetic oligonucleotide"
cucaacuuacaaauacccug

SEQ ID NO: 34 - RNA, 20 nt, Artificial Sequence
  source: /note="Description of Artificial Sequence: Synthetic oligonucleotide"
agugcagaauaugccccgca

SEQ ID NO: 35 - RNA, 20 nt, Artificial Sequence
  source: /note="Description of Artificial Sequence: Synthetic oligonucleotide"
gcauauucugcacucauccc

SEQ ID NO: 36 - RNA, 20 nt, Artificial Sequence
  source: /note="Description of Artificial Sequence: Synthetic oligonucleotide"
gagcucuaauccccacgccu

SEQ ID NO: 37 - RNA, 20 nt, Artificial Sequence
  source: /note="Description of Artificial Sequence: Synthetic oligonucleotide"
agagcuccaugugcagaacg

SEQ ID NO: 38 - RNA, 20 nt, Artificial Sequence
  source: /note="Description of Artificial Sequence: Synthetic oligonucleotide"
gauaaacuucugcacuggag

SEQ ID NO: 39 - RNA, 20 nt, Artificial Sequence
  source: /note="Description of Artificial Sequence: Synthetic oligonucleotide"
uagcuguagugcuugauuuu

SEQ ID NO: 40 - RNA, 20 nt, Artificial Sequence
  source: /note="Description of Artificial Sequence: Synthetic oligonucleotide"
uauccaaauucauacaauag

SEQ ID NO: 41 - RNA, 20 nt, Artificial Sequence
  source: /note="Description of Artificial Sequence: Synthetic oligonucleotide"
augcccugaguaucccaaca

SEQ ID NO: 42 - RNA, 20 nt, Artificial Sequence
  source: /note="Description of Artificial Sequence: Synthetic oligonucleotide"
uaguaacagacccaugugcu

SEQ ID NO: 43 - RNA, 20 nt, Artificial Sequence
  source: /note="Description of Artificial Sequence: Synthetic oligonucleotide"
auacuucaaggccucaauga

SEQ ID NO: 44 - RNA, 20 nt, Artificial Sequence
  source: /note="Description of Artificial Sequence: Synthetic oligonucleotide"
gacuagguagaccuucauug

SEQ ID NO: 45 - RNA, 20 nt, Artificial Sequence
  source: /note="Description of Artificial Sequence: Synthetic oligonucleotide"
cugagcuagugggggcucuu

SEQ ID NO: 46 - RNA, 20 nt, Artificial Sequence
  source: /note="Description of Artificial Sequence: Synthetic oligonucleotide"
cugagcacauucuuacgccu

SEQ ID NO: 47 - DNA, 20 bp, Artificial Sequence
  source: /note="Description of Artificial Sequence: Synthetic oligonucleotide"
  source: /note="Description of Combined DNA/RNA Molecule: Synthetic oligonucleotide"
uuuauaagacauuaggguat

SEQ ID NO: 48 - RNA, 20 nt, Artificial Sequence
  source: /note="Description of Artificial Sequence: Synthetic oligonucleotide"
ugauaggugccuauauguga

SEQ ID NO: 49 - RNA, 20 nt, Artificial Sequence
  source: /note="Description of Artificial Sequence: Synthetic oligonucleotide"
uccacccauccaucacauau

SEQ ID NO: 50 - RNA, 20 nt, Artificial Sequence
  source: /note="Description of Artificial Sequence: Synthetic oligonucleotide"
cuucaaaguuguauugaccc

SEQ ID NO: 51 - RNA, 20 nt, Artificial Sequence
  source: /note="Description of Artificial Sequence: Synthetic oligonucleotide"
aaaccagacuaguuuauagg

SEQ ID NO: 52 - RNA, 20 nt, Artificial Sequence
  source: /note="Description of Artificial Sequence: Synthetic oligonucleotide"
uuugagacaguuaccccuuc

SEQ ID NO: 53 - RNA, 20 nt, Artificial Sequence
  source: /note="Description of Artificial Sequence: Synthetic oligonucleotide"
aaccugagggcuaguuucua

SEQ ID NO: 54 - RNA, 20 nt, Artificial Sequence
  source: /note="Description of Artificial Sequence: Synthetic oligonucleotide"
gccuggacccaccgcuucau

SEQ ID NO: 55 - RNA, 20 nt, Artificial Sequence
  source: /note="Description of Artificial Sequence: Synthetic oligonucleotide"
aaaccagugaggucaucuau

SEQ ID NO: 56 - RNA, 20 nt, Artificial Sequence
  source: /note="Description of Artificial Sequence: Synthetic oligonucleotide"
accugcuauguguuccuguu

SEQ ID NO: 57 - RNA, 20 nt, Artificial Sequence
  source: /note="Description of Artificial Sequence: Synthetic oligonucleotide"
uagaggaauuugccccaaac

SEQ ID NO: 58 - RNA, 20 nt, Artificial Sequence
  source: /note="Description of Artificial Sequence: Synthetic oligonucleotide"
gauaaacaaucgucauccuc

SEQ ID NO: 59 - RNA, 20 nt, Artificial Sequence
  source: /note="Description of Artificial Sequence: Synthetic oligonucleotide"
uggcauccaggucacgccag

SEQ ID NO: 60 - RNA, 20 nt, Artificial Sequence
  source: /note="Description of Artificial Sequence: Synthetic oligonucleotide"
gaccuggaugccaaccucca

SEQ ID NO: 61 - RNA, 20 nt, Artificial Sequence
  source: /note="Description of Artificial Sequence: Synthetic oligonucleotide"
aaaagcauccaaucccgugg

SEQ ID NO: 62 - RNA, 20 nt, Artificial Sequence
  source: /note="Description of Artificial Sequence: Synthetic oligonucleotide"
gaugcuuuuuucaucucgau

SEQ ID NO: 63 - RNA, 20 nt, Artificial Sequence
  source: /note="Description of Artificial Sequence: Synthetic oligonucleotide"
ccacagcuuuuucuaagcag

SEQ ID NO: 64 - RNA, 20 nt, Artificial Sequence
  source: /note="Description of Artificial Sequence: Synthetic oligonucleotide"
cccccaaugggaaguucauc

SEQ ID NO: 65 - RNA, 20 nt, Artificial Sequence
  source: /note="Description of Artificial Sequence: Synthetic oligonucleotide"
aucaugaccuccucaccugu

SEQ ID NO: 66 - RNA, 20 nt, Artificial Sequence
  source: /note="Description of Artificial Sequence: Synthetic oligonucleotide"
aggaggucaugauccccuuc

SEQ ID NO: 67 - RNA, 20 nt, Artificial Sequence
  source: /note="Description of Artificial Sequence: Synthetic oligonucleotide"
ccccuucuggagcucccaac

SEQ ID NO: 68 - RNA, 20 nt, Artificial Sequence
  source: /note="Description of Artificial Sequence: Synthetic oligonucleotide"
gcucccaacgggccgugguc

SEQ ID NO: 69 - RNA, 20 nt, Artificial Sequence
  source: /note="Description of Artificial Sequence: Synthetic oligonucleotide"
acagaugaugaaccagacca

SEQ ID NO: 70 - RNA, 20 nt, Artificial Sequence
  source: /note="Description of Artificial Sequence: Synthetic oligonucleotide"
ucuguaagaauggcuucaag

SEQ ID NO: 71 - RNA, 20 nt, Artificial Sequence
  source: /note="Description of Artificial Sequence: Synthetic oligonucleotide"
caauuauuagagugccagag

SEQ ID NO: 72 - RNA, 20 nt, Artificial Sequence
  source: /note="Description of Artificial Sequence: Synthetic oligonucleotide"
gccuugcuugcggcgagaca

SEQ ID NO: 73 - RNA, 20 nt, Artificial Sequence
  source: /note="Description of Artificial Sequence: Synthetic oligonucleotide"
accaugucucgccgcaagca

SEQ ID NO: 74 - RNA, 20 nt, Artificial Sequence
  source: /note="Description of Artificial Sequence: Synthetic oligonucleotide"
gagucuccuucuuucuaacc

SEQ ID NO: 75 - RNA, 20 nt, Artificial Sequence
  source: /note="Description of Artificial Sequence: Synthetic oligonucleotide"
gaauugugggagagccguca

SEQ ID NO: 76 - RNA, 20 nt, Artificial Sequence
  source: /note="Description of Artificial Sequence: Synthetic oligonucleotide"
aaaauagagcgagagugcac

SEQ ID NO: 77 - RNA, 20 nt, Artificial Sequence
  source: /note="Description of Artificial Sequence: Synthetic oligonucleotide"
gccccuggcguccacacgcg

SEQ ID NO: 78 - RNA, 20 nt, Artificial Sequence
  source: /note="Description of Artificial Sequence: Synthetic oligonucleotide"
cuccucguucuuuauuccuc

SEQ ID NO: 79 - RNA, 20 nt, Artificial Sequence
  source: /note="Description of Artificial Sequence: Synthetic oligonucleotide"
gacugcccgcgcuuuguccu

SEQ ID NO: 80 - RNA, 20 nt, Artificial Sequence
  source: /note="Description of Artificial Sequence: Synthetic oligonucleotide"
uucccagggacugggacucc

SEQ ID NO: 81 - RNA, 20 nt, Artificial Sequence
  source: /note="Description of Artificial Sequence: Synthetic oligonucleotide"
uggcuccugggugugcgccu

SEQ ID NO: 82 - RNA, 20 nt, Artificial Sequence
  source: /note="Description of Artificial Sequence: Synthetic oligonucleotide"
ugaagcccgcuuuuugacag

SEQ ID NO: 83 - RNA, 20 nt, Artificial Sequence
  source: /note="Description of Artificial Sequence: Synthetic oligonucleotide"
aggguggagacgggucgcca

SEQ ID NO: 84 - RNA, 20 nt, Artificial Sequence
  source: /note="Description of Artificial Sequence: Synthetic oligonucleotide"
gcucagggucucgcgggcca

SEQ ID NO: 85 - RNA, 20 nt, Artificial Sequence
  source: /note="Description of Artificial Sequence: Synthetic oligonucleotide"
ugaguccgagcagaagaaga

SEQ ID NO: 86 - RNA, 20 nt, Artificial Sequence
  source: /note="Description of Artificial Sequence: Synthetic oligonucleotide"
ucuuaaaccaaccugcucac

SEQ ID NO: 87 - RNA, 20 nt, Artificial Sequence
  source: /note="Description of Artificial Sequence: Synthetic oligonucleotide"
cagguugguuuaagauaagc

SEQ ID NO: 88 - RNA, 20 nt, Artificial Sequence
  source: /note="Description of Artificial Sequence: Synthetic oligonucleotide"
agguugguuuaagauaagca

SEQ ID NO: 89 - RNA, 20 nt, Artificial Sequence
  source: /note="Description of Artificial Sequence: Synthetic oligonucleotide"
uuaagggaauaguggaauga

SEQ ID NO: 90 - RNA, 20 nt, Artificial Sequence
  source: /note="Description of Artificial Sequence: Synthetic oligonucleotide"
agggcaaguuaagggaauag

SEQ ID NO: 91 - RNA, 20 nt, Artificial Sequence
  source: /note="Description of Artificial Sequence: Synthetic oligonucleotide"
cccuuaacuugcccugagau

SEQ ID NO: 92 - RNA, 20 nt, Artificial Sequence
  source: /note="Description of Artificial Sequence: Synthetic oligonucleotide"
ccaaucucagggcaaguuaa

SEQ ID NO: 93 - RNA, 20 nt, Artificial Sequence
  source: /note="Description of Artificial Sequence: Synthetic oligonucleotide"
gccaaucucagggcaaguua

SEQ ID NO: 94 - RNA, 20 nt, Artificial Sequence
  source: /note="Description of Artificial Sequence: Synthetic oligonucleotide"
ugacagaacagccaaucuca

SEQ ID NO: 95 - RNA, 20 nt, Artificial Sequence
  source: /note="Description of Artificial Sequence: Synthetic oligonucleotide"
augacagaacagccaaucuc

SEQ ID NO: 96 - RNA, 20 nt, Artificial Sequence
  source: /note="Description of Artificial Sequence: Synthetic oligonucleotide"
gagauauguagaggagaaca

SEQ ID NO: 97 - RNA, 20 nt, Artificial Sequence
  source: /note="Description of Artificial Sequence: Synthetic oligonucleotide"
ggagauauguagaggagaac

SEQ ID NO: 98 - RNA, 20 nt, Artificial Sequence
  source: /note="Description of Artificial Sequence: Synthetic oligonucleotide"
ugcgguggggagauauguag

SEQ ID NO: 99 - RNA, 20 nt, Artificial Sequence
  source: /note="Description of Artificial Sequence: Synthetic oligonucleotide"
cugcugaaagagaugcggug

SEQ ID NO: 100 - RNA, 20 nt, Artificial Sequence
  source: /note="Description of Artificial Sequence: Synthetic oligonucleotide"
acugcugaaagagaugcggu

SEQ ID NO: 101 - RNA, 20 nt, Artificial Sequence
  source: /note="Description of Artificial Sequence: Synthetic oligonucleotide"
aacugcugaaagagaugcgg

SEQ ID NO: 102 - RNA, 20 nt, Artificial Sequence
  source: /note="Description of Artificial Sequence: Synthetic oligonucleotide"
aacaacugcugaaagagaug

SEQ ID NO: 103 - RNA, 20 nt, Artificial Sequence
  source: /note="Description of Artificial Sequence: Synthetic oligonucleotide"
ucugcaaaaaugaaacuagg

SEQ ID NO: 104 - RNA, 20 nt, Artificial Sequence
  source: /note="Description of Artificial Sequence: Synthetic oligonucleotide"
acuucugcaaaaaugaaacu

SEQ ID NO: 105 - RNA, 20 nt, Artificial Sequence
  source: /note="Description of Artificial Sequence: Synthetic oligonucleotide"
cauuuuugcagaaguguuuu

SEQ ID NO: 106 - RNA, 20 nt, Artificial Sequence
  source: /note="Description of Artificial Sequence: Synthetic oligonucleotide"
aguguuuuaggcuaauauag

SEQ ID NO: 107 - RNA, 20 nt, Artificial Sequence
  source: /note="Description of Artificial Sequence: Synthetic oligonucleotide"
uuggagacaaaaaucucuag

SEQ ID NO: 108 - RNA, 20 nt, Artificial Sequence
  source: /note="Description of Artificial Sequence: Synthetic oligonucleotide"
ucuagagauuuuugucucca

SEQ ID NO: 109 - RNA, 20 nt, Artificial Sequence
  source: /note="Description of Artificial Sequence: Synthetic oligonucleotide"
cuagagauuuuugucuccaa

SEQ ID NO: 110 - RNA, 20 nt, Artificial Sequence
  source: /note="Description of Artificial Sequence: Synthetic oligonucleotide"
gucuccaagggaauuuugag

SEQ ID NO: 111 - RNA, 20 nt, Artificial Sequence
  source: /note="Description of Artificial Sequence: Synthetic oligonucleotide"
ccaagggaauuuugagaggu

SEQ ID NO: 112 - RNA, 20 nt, Artificial Sequence
  source: /note="Description of Artificial Sequence: Synthetic oligonucleotide"
ccaaccucucaaaauucccu

SEQ ID NO: 113 - RNA, 20 nt, Artificial Sequence
  source: /note="Description of Artificial Sequence: Synthetic oligonucleotide"
ggaauuuugagagguuggaa

SEQ ID NO: 114 - RNA, 20 nt, Artificial Sequence
  source: /note="Description of Artificial Sequence: Synthetic oligonucleotide"
ugcuugcuuccuccuucuuu

SEQ ID NO: 115 - RNA, 20 nt, Artificial Sequence
  source: /note="Description of Artificial Sequence: Synthetic oligonucleotide"
aagaauuuaccaaaagaagg

SEQ ID NO: 116 - RNA, 20 nt, Artificial Sequence
  source: /note="Description of Artificial Sequence: Synthetic oligonucleotide"
aggaagaauuuaccaaaaga

SEQ ID NO: 117 - RNA, 20 nt, Artificial Sequence
  source: /note="Description of Artificial Sequence: Synthetic oligonucleotide"
aaaaauuagaguuuuauuau

SEQ ID NO: 118 - RNA, 20 nt, Artificial Sequence
  source: /note="Description of Artificial Sequence: Synthetic oligonucleotide"
uuuuuuaaauauucuuuuaa

SEQ ID NO: 119 - RNA, 20 nt, Artificial Sequence
  source: /note="Description of Artificial Sequence: Synthetic oligonucleotide"
uauuuaccaguuauugaaau

SEQ ID NO: 120 - RNA, 20 nt, Artificial Sequence
  source: /note="Description of Artificial Sequence: Synthetic oligonucleotide"
ccaguuauugaaauagguuc

SEQ ID NO: 121 - RNA, 20 nt, Artificial Sequence
  source: /note="Description of Artificial Sequence: Synthetic oligonucleotide"
ccagaaccuauuucaauaac

SEQ ID NO: 122 - RNA, 20 nt, Artificial Sequence
  source: /note="Description of Artificial Sequence: Synthetic oligonucleotide"
uucuggaaacaugaauuuua

SEQ ID NO: 123 - RNA, 20 nt, Artificial Sequence
  source: /note="Description of Artificial Sequence: Synthetic oligonucleotide"
auuuugaauguuuaaaauua

SEQ ID NO: 124 - RNA, 20 nt, Artificial Sequence
  source: /note="Description of Artificial Sequence: Synthetic oligonucleotide"
aaauuuaaucuggcugaaua

SEQ ID NO: 125 - RNA, 20 nt, Artificial Sequence
  source: /note="Description of Artificial Sequence: Synthetic oligonucleotide"
gaacuucguuaaauuuaauc

SEQ ID NO: 126 - RNA, 20 nt, Artificial Sequence
  source: /note="Description of Artificial Sequence: Synthetic oligonucleotide"
auuaaauuuaacgaaguucc

SEQ ID NO: 127 - RNA, 20 nt, Artificial Sequence
  source: /note="Description of Artificial Sequence: Synthetic oligonucleotide"
uuaaauuuaacgaaguuccu

SEQ ID NO: 128 - RNA, 20 nt, Artificial Sequence
  source: /note="Description of Artificial Sequence: Synthetic oligonucleotide"
uucuguacuagcauauuccc

SEQ ID NO: 129 - RNA, 20 nt, Artificial Sequence
  source: /note="Description of Artificial Sequence: Synthetic oligonucleotide"
uguguucuuaaaaaaaaaug

SEQ ID NO: 130 - RNA, 20 nt, Artificial Sequence
  source: /note="Description of Artificial Sequence: Synthetic oligonucleotide"
aaaaauguggaauuagaccc

SEQ ID NO: 131 - RNA, 20 nt, Artificial Sequence
  source: /note="Description of Artificial Sequence: Synthetic oligonucleotide"
cuacugggaucuucauuccu

SEQ ID NO: 132 - RNA, 20 nt, Artificial Sequence
  source: /note="Description of Artificial Sequence: Synthetic oligonucleotide"
acuacugggaucuucauucc

SEQ ID NO: 133 - RNA, 20 nt, Artificial Sequence
  source: /note="Description of Artificial Sequence: Synthetic oligonucleotide"
gaaaagagugaaaaacuacu

SEQ ID NO: 134 - RNA, 20 nt, Artificial Sequence
  source: /note="Description of Artificial Sequence: Synthetic oligonucleotide"
agaaaagagugaaaaacuac

SEQ ID NO: 135 - RNA, 20 nt, Artificial Sequence
  source: /note="Description of Artificial Sequence: Synthetic oligonucleotide"
gaauucaaauaaugccacaa

SEQ ID NO: 136 - RNA, 20 nt, Artificial Sequence
  source: /note="Description of Artificial Sequence: Synthetic oligonucleotide"
uguguauuugucugccauug

SEQ ID NO: 137 - RNA, 20 nt, Artificial Sequence
  source: /note="Description of Artificial Sequence: Synthetic oligonucleotide"
cacccaugagcauauccaaa

SEQ ID NO: 138 - RNA, 20 nt, Artificial Sequence
  source: /note="Description of Artificial Sequence: Synthetic oligonucleotide"
uuccuuuuggauaugcucau

SEQ ID NO: 139 - RNA, 20 nt, Artificial Sequence
  source: /note="Description of Artificial Sequence: Synthetic oligonucleotide"
cuuccuuuuggauaugcuca

SEQ ID NO: 140 - RNA, 20 nt, Artificial Sequence
  source: /note="Description of Artificial Sequence: Synthetic oligonucleotide"
caugagcauauccaaaagga

SEQ ID NO: 141 - RNA, 20 nt, Artificial Sequence
  source: /note="Description of Artificial Sequence: Synthetic oligonucleotide"
uauccaaaaggaaggauuga

SEQ ID NO: 142 - RNA, 20 nt, Artificial Sequence
  source: /note="Description of Artificial Sequence: Synthetic oligonucleotide"
uuuccuucaauccuuccuuu

SEQ ID NO: 143 - RNA, 20 nt, Artificial Sequence
  source: /note="Description of Artificial Sequence: Synthetic oligonucleotide"
aaggaaggauugaaggaaag

SEQ ID NO: 144 - RNA, 20 nt, Artificial Sequence
  source: /note="Description of Artificial Sequence: Synthetic oligonucleotide"
gaaggauugaaggaaagagg

SEQ ID NO: 145 - RNA, 20 nt, Artificial Sequence
  source: /note="Description of Artificial Sequence: Synthetic oligonucleotide"
gaggaggaagaaauggagaa

SEQ ID NO: 146 - RNA, 20 nt, Artificial Sequence
  source: /note="Description of Artificial Sequence: Synthetic oligonucleotide"
aggaagaaauggagaaagga

SEQ ID NO: 147 - RNA, 20 nt, Artificial Sequence
  source: /note="Description of Artificial Sequence: Synthetic oligonucleotide"
gaaggaagaggggaagagag

SEQ ID NO: 148 - RNA, 20 nt, Artificial Sequence
  source: /note="Description of Artificial Sequence: Synthetic oligonucleotide"
gaagaggggaagagagagga

SEQ ID NO: 149 - RNA, 20 nt, Artificial Sequence
  source: /note="Description of Artificial Sequence: Synthetic oligonucleotide"
aggggaagagagaggaugga

SEQ ID NO: 150 - RNA, 20 nt, Artificial Sequence
  source: /note="Description of Artificial Sequence: Synthetic oligonucleotide"
ggggaagagagaggauggaa

SEQ ID NO: 151 - RNA, 20 nt, Artificial Sequence
  source: /note="Description of Artificial Sequence: Synthetic oligonucleotide"
aagagagaggauggaaggga

SEQ ID NO: 152 - RNA, 20 nt, Artificial Sequence
  source: /note="Description of Artificial Sequence: Synthetic oligonucleotide"
agagaggauggaagggaugg

SEQ ID NO: 153 - RNA, 20 nt, Artificial Sequence
  source: /note="Description of Artificial Sequence: Synthetic oligonucleotide"
ggaagggauggaggagaaga

SEQ ID NO: 154 - RNA, 20 nt, Artificial Sequence
  source: /note="Description of Artificial Sequence: Synthetic oligonucleotide"
gaagaaggaaaaauaaauaa

SEQ ID NO: 155 - RNA, 20 nt, Artificial Sequence
  source: /note="Description of Artificial Sequence: Synthetic oligonucleotide"
aggaaaaauaaauaauggag

SEQ ID NO: 156 - RNA, 20 nt, Artificial Sequence
  source: /note="Description of Artificial Sequence: Synthetic oligonucleotide"
aaauaaauaauggagaggag

SEQ ID NO: 157 - RNA, 20 nt, Artificial Sequence
  source: /note="Description of Artificial Sequence: Synthetic oligonucleotide"
uggagaggagaggagaaaaa

SEQ ID NO: 158 - RNA, 20 nt, Artificial Sequence
  source: /note="Description of Artificial Sequence: Synthetic oligonucleotide"
agaggagaggagaaaaaagg

SEQ ID NO: 159 - RNA, 20 nt, Artificial Sequence
  source: /note="Description of Artificial Sequence: Synthetic oligonucleotide"
gaggagaggagaaaaaagga

SEQ ID NO: 160 - RNA, 20 nt, Artificial Sequence
  source: /note="Description of Artificial Sequence: Synthetic oligonucleotide"
aggagaggagaaaaaaggag

SEQ ID NO: 161 - RNA, 20 nt, Artificial Sequence
  source: /note="Description of Artificial Sequence: Synthetic oligonucleotide"
aggagaaaaaaggaggggag

SEQ ID NO: 162 - RNA, 20 nt, Artificial Sequence
  source: /note="Description of Artificial Sequence: Synthetic oligonucleotide"
gagaggagaggagaagggau

SEQ ID NO: 163 - RNA, 20 nt, Artificial Sequence
  source: /note="Description of Artificial Sequence: Synthetic oligonucleotide"
agaggagaggagaagggaua

SEQ ID NO: 164 - RNA, 20 nt, Artificial Sequence
  source: /note="Description of Artificial Sequence: Synthetic oligonucleotide"
gaagagaaagagaaagggaa

SEQ ID NO: 165 - RNA, 20 nt, Artificial Sequence
  source: /note="Description of Artificial Sequence: Synthetic oligonucleotide"
aagagaggaaagaagagaag

SEQ ID NO: 166 - RNA, 20 nt, Artificial Sequence
  source: /note="Description of Artificial Sequence: Synthetic oligonucleotide"
gagagaaaagaaacgaagag

SEQ ID NO: 167 - RNA, 20 nt, Artificial Sequence
  source: /note="Description of Artificial Sequence: Synthetic oligonucleotide"
agagaaaagaaacgaagaga

SEQ ID NO: 168 - RNA, 20 nt, Artificial Sequence
  source: /note="Description of Artificial Sequence: Synthetic oligonucleotide"
gagaaaagaaacgaagagag

SEQ ID NO: 169 - RNA, 20 nt, Artificial Sequence
  source: /note="Description of Artificial Sequence: Synthetic oligonucleotide"
aaagaaacgaagagagggga

SEQ ID NO: 170 - RNA, 20 nt, Artificial Sequence
  source: /note="Description of Artificial Sequence: Synthetic oligonucleotide"
aagaaacgaagagaggggaa

SEQ ID NO: 171 - RNA, 20 nt, Artificial Sequence
  source: /note="Description of Artificial Sequence: Synthetic oligonucleotide"
ggaagggaaggaaaaaaaag

SEQ ID NO: 172 - RNA, 20 nt, Artificial Sequence
  source: /note="Description of Artificial Sequence: Synthetic oligonucleotide"
aagacugacaguucaaauuu

SEQ ID NO: 173 - RNA, 20 nt, Artificial Sequence
  source: /note="Description of Artificial Sequence: Synthetic oligonucleotide"
acugacaguucaaauuuugg

SEQ ID NO: 174 - RNA, 20 nt, Artificial Sequence
  source: /note="Description of Artificial Sequence: Synthetic oligonucleotide"
uucaaauuuugguggugaua

SEQ ID NO: 175 - RNA, 20 nt, Artificial Sequence
  source: /note="Description of Artificial Sequence: Synthetic oligonucleotide"
aauagaaacucaaacucugu

SEQ ID NO: 176 - RNA, 20 nt, Artificial Sequence
  source: /note="Description of Artificial Sequence: Synthetic oligonucleotide"
guacaauaguauaaccccuu

SEQ ID NO: 177 - RNA, 20 nt, Artificial Sequence
  source: /note="Description of Artificial Sequence: Synthetic oligonucleotide"
cuauuaaagguuuuccaaag

SEQ ID NO: 178 - RNA, 20 nt, Artificial Sequence
  source: /note="Description of Artificial Sequence: Synthetic oligonucleotide"
acuauuaaagguuuuccaaa

SEQ ID NO: 179 - RNA, 20 nt, Artificial Sequence
  source: /note="Description of Artificial Sequence: Synthetic oligonucleotide"
uacuauuaaagguuuuccaa

SEQ ID NO: 180 - RNA, 20 nt, Artificial Sequence
  source: /note="Description of Artificial Sequence: Synthetic oligonucleotide"
gcauuuguggauacuauuaa

SEQ ID NO: 181 - RNA, 20 nt, Artificial Sequence
  source: /note="Description of Artificial Sequence: Synthetic oligonucleotide"
uuaauaguauccacaaaugc

SEQ ID NO: 182 - RNA, 20 nt, Artificial Sequence
  source: /note="Description of Artificial Sequence: Synthetic oligonucleotide"
uaugcaauuuuugccaagau

SEQ ID NO: 183 - RNA, 20 nt, Artificial Sequence
  source: /note="Description of Artificial Sequence: Synthetic oligonucleotide"
uuuugccaagaugggaguau

SEQ ID NO: 184 - RNA, 20 nt, Artificial Sequence
  source: /note="Description of Artificial Sequence: Synthetic oligonucleotide"
uuugccaagaugggaguaug

SEQ ID NO: 185 - RNA, 20 nt, Artificial Sequence
  source: /note="Description of Artificial Sequence: Synthetic oligonucleotide"
ucagugagaugagauaucaa

SEQ ID NO: 186 - RNA, 20 nt, Artificial Sequence
  source: /note="Description of Artificial Sequence: Synthetic oligonucleotide"
cagugagaugagauaucaaa

SEQ ID NO: 187 - RNA, 20 nt, Artificial Sequence
  source: /note="Description of Artificial Sequence: Synthetic oligonucleotide"
ccaucucccuaaucuccaau

SEQ ID NO: 188 - RNA, 20 nt, Artificial Sequence
  source: /note="Description of Artificial Sequence: Synthetic oligonucleotide"
ccaauuggagauuagggaga

SEQ ID NO: 189 - RNA, 20 nt, Artificial Sequence
  source: /note="Description of Artificial Sequence: Synthetic oligonucleotide"
gcuuugccaauuggagauua

SEQ ID NO: 190 - RNA, 20 nt, Artificial Sequence
  source: /note="Description of Artificial Sequence: Synthetic oligonucleotide"
ggcuuugccaauuggagauu

SEQ ID NO: 191 - RNA, 20 nt, Artificial Sequence
  source: /note="Description of Artificial Sequence: Synthetic oligonucleotide"
aauuggcaaagccagacuug

SEQ ID NO: 192 - RNA, 20 nt, Artificial Sequence
  source: /note="Description of Artificial Sequence: Synthetic oligonucleotide"
agucuguauugccccaaguc

SEQ ID NO: 193 - RNA, 20 nt, Artificial Sequence
  source: /note="Description of Artificial Sequence: Synthetic oligonucleotide"
agacuuggggcaauacagac

SEQ ID NO: 194 - RNA, 20 nt, Artificial Sequence
  source: /note="Description of Artificial Sequence: Synthetic oligonucleotide"
acauuuggugauaaaucauu

SEQ ID NO: 195 - RNA, 20 nt, Artificial Sequence
  source: /note="Description of Artificial Sequence: Synthetic oligonucleotide"
ccaaauguucuuucuucagc

SEQ ID NO: 196 - RNA, 20 nt, Artificial Sequence
  source: /note="Description of Artificial Sequence: Synthetic oligonucleotide"
auaauaguauaugcuucaua

SEQ ID NO: 197 - RNA, 20 nt, Artificial Sequence
  source: /note="Description of Artificial Sequence: Synthetic oligonucleotide"
cggagcacuuacucugcucu

SEQ ID NO: 198 - RNA, 20 nt, Artificial Sequence
  source: /note="Description of Artificial Sequence: Synthetic oligonucleotide"
agcauuuuaguucacaagcu

SEQ ID NO: 199 - RNA, 20 nt, Artificial Sequence
  source: /note="Description of Artificial Sequence: Synthetic oligonucleotide"
uguaacuaauaaauaccagg

SEQ ID NO: 200 - RNA, 20 nt, Artificial Sequence
  source: /note="Description of Artificial Sequence: Synthetic oligonucleotide"
agguguaacuaauaaauacc

SEQ ID NO: 201 - RNA, 20 nt, Artificial Sequence
  source: /note="Description of Artificial Sequence: Synthetic oligonucleotide"
ucugacccaaacuaggaauu

SEQ ID NO: 202 - RNA, 20 nt, Artificial Sequence
  source: /note="Description of Artificial Sequence: Synthetic oligonucleotide"
aaggaaaagaauaugacguc

SEQ ID NO: 203 - RNA, 20 nt, Artificial Sequence
  source: /note="Description of Artificial Sequence: Synthetic oligonucleotide"
aggaaaagaauaugacguca

SEQ ID NO: 204 - RNA, 20 nt, Artificial Sequence
  source: /note="Description of Artificial Sequence: Synthetic oligonucleotide"
ggaaaagaauaugacgucag

SEQ ID NO: 205 - RNA, 20 nt, Artificial Sequence
  source: /note="Description of Artificial Sequence: Synthetic oligonucleotide"
gaaaagaauaugacgucagg

SEQ ID NO: 206 - RNA, 20 nt, Artificial Sequence
  source: /note="Description of Artificial Sequence: Synthetic oligonucleotide"
ucagggggaggcaagucagu

SEQ ID NO: 207 - RNA, 20 nt, Artificial Sequence
  source: /note="Description of Artificial Sequence: Synthetic oligonucleotide"
cagggggaggcaagucaguu

SEQ ID NO: 208 - RNA, 20 nt, Artificial Sequence
  source: /note="Description of Artificial Sequence: Synthetic oligonucleotide"
aucacauauaggcaccuauc

SEQ ID NO: 209 - RNA, 20 nt, Artificial Sequence
  source: /note="Description of Artificial Sequence: Synthetic oligonucleotide"
cagguaccagcuacuguguu

SEQ ID NO: 210 - RNA, 20 nt, Artificial Sequence
  source: /note="Description of Artificial Sequence: Synthetic oligonucleotide"
acuauccacggauauacacu

SEQ ID NO: 211 - RNA, 20 nt, Artificial Sequence
  source: /note="Description of Artificial Sequence: Synthetic oligonucleotide"
cacaguagcugguaccugau

SEQ ID NO: 212 - RNA, 20 nt, Artificial Sequence
  source: /note="Description of Artificial Sequence: Synthetic oligonucleotide"
aucacauauaggcaccuauc

SEQ ID NO: 213 - RNA, 20 nt, Artificial Sequence
  source: /note="Description of Artificial Sequence: Synthetic oligonucleotide"
ugauaggugccuauauguga

SEQ ID NO: 214 - RNA, 20 nt, Artificial Sequence
  source: /note="Description of Artificial Sequence: Synthetic oligonucleotide"
aggugccuauaugugaugga

SEQ ID NO: 215 - RNA, 20 nt, Artificial Sequence
  source: /note="Description of Artificial Sequence: Synthetic oligonucleotide"
ggugccuauaugugauggau

SEQ ID NO: 216 - RNA, 20 nt, Artificial Sequence
  source: /note="Description of Artificial Sequence: Synthetic oligonucleotide"
uccacccauccaucacauau

SEQ ID NO: 217 - RNA, 20 nt, Artificial Sequence
  source: /note="Description of Artificial Sequence: Synthetic oligonucleotide"
acagcccgacagaugaaaaa

SEQ ID NO: 218 - RNA, 20 nt, Artificial Sequence
  source: /note="Description of Artificial Sequence: Synthetic oligonucleotide"
augaaaaauggacaauuaug

SEQ ID NO: 219 - RNA, 20 nt, Artificial Sequence
  source: /note="Description of Artificial Sequence: Synthetic oligonucleotide"
aaaaauggacaauuaugagg

SEQ ID NO: 220 - RNA, 20 nt, Artificial Sequence
  source: /note="Description of Artificial Sequence: Synthetic oligonucleotide"
aaaauggacaauuaugagga

SEQ ID NO: 221 - RNA, 20 nt, Artificial Sequence
  source: /note="Description of Artificial Sequence: Synthetic oligonucleotide"
aaauggacaauuaugaggag

SEQ ID NO: 222 - RNA, 20 nt, Artificial Sequence
  source: /note="Description of Artificial Sequence: Synthetic oligonucleotide"
gaggaggggagagugcagac

SEQ ID NO: 223 - RNA, 20 nt, Artificial Sequence
  source: /note="Description of Artificial Sequence: Synthetic oligonucleotide"
aggaggggagagugcagaca

SEQ ID NO: 224 - RNA, 20 nt, Artificial Sequence
  source: /note="Description of Artificial Sequence: Synthetic oligonucleotide"
cuucaccuccuuuacaauuu

SEQ ID NO: 225 - RNA, 20 nt, Artificial Sequence
  source: /note="Description of Artificial Sequence: Synthetic oligonucleotide"
uucaccuccuuuacaauuuu

SEQ ID NO: 226 - RNA, 20 nt, Artificial Sequence
  source: /note="Description of Artificial Sequence: Synthetic oligonucleotide"
gacucccaaaauuguaaagg

SEQ ID NO: 227 - RNA, 20 nt, Artificial Sequence
  source: /note="Description of Artificial Sequence: Synthetic oligonucleotide"
guggacucccaaaauuguaa

SEQ ID NO: 228 - RNA, 20 nt, Artificial Sequence
  source: /note="Description of Artificial Sequence: Synthetic oligonucleotide"
uuuugggaguccacacggca

SEQ ID NO: 229 - RNA, 20 nt, Artificial Sequence
  source: /note="Description of Artificial Sequence: Synthetic oligonucleotide"
aauuuguaugccaugccgug

SEQ ID NO: 230 - RNA, 20 nt, Artificial Sequence
  source: /note="Description of Artificial Sequence: Synthetic oligonucleotide"
ccaagagagccuuccgaaag

SEQ ID NO: 231 - RNA, 20 nt, Artificial Sequence
  source: /note="Description of Artificial Sequence: Synthetic oligonucleotide"
ccaggggggccucuuucgga

SEQ ID NO: 232 - RNA, 20 nt, Artificial Sequence
  source: /note="Description of Artificial Sequence: Synthetic oligonucleotide"
ccuuccgaaagaggcccccc

SEQ ID NO: 233 - RNA, 20 nt, Artificial Sequence
  source: /note="Description of Artificial Sequence: Synthetic oligonucleotide"
cuuccgaaagaggccccccu

SEQ ID NO: 234 - RNA, 20 nt, Artificial Sequence
  source: /note="Description of Artificial Sequence: Synthetic oligonucleotide"
aagaggccccccugggcaaa

SEQ ID NO: 235 - RNA, 20 nt, Artificial Sequence
  source: /note="Description of Artificial Sequence: Synthetic oligonucleotide"
cgguggccguuugcccaggg

SEQ ID NO: 236 - RNA, 20 nt, Artificial Sequence
  source: /note="Description of Artificial Sequence: Synthetic oligonucleotide"
ucgguggccguuugcccagg

SEQ ID NO: 237 - RNA, 20 nt, Artificial Sequence
  source: /note="Description of Artificial Sequence: Synthetic oligonucleotide"
aucgguggccguuugcccag

SEQ ID NO: 238 - RNA, 20 nt, Artificial Sequence
  source: /note="Description of Artificial Sequence: Synthetic oligonucleotide"
caucgguggccguuugccca

SEQ ID NO: 239 - RNA, 20 nt, Artificial Sequence
  source: /note="Description of Artificial Sequence: Synthetic oligonucleotide"
ccugggcaaacggccaccga

SEQ ID NO: 240 - RNA, 20 nt, Artificial Sequence
  source: /note="Description of Artificial Sequence: Synthetic oligonucleotide"
ccaucgguggccguuugccc

SEQ ID NO: 241 - RNA, 20 nt, Artificial Sequence
  source: /note="Description of Artificial Sequence: Synthetic oligonucleotide"
gcaaacggccaccgauggag

SEQ ID NO: 242 - RNA, 20 nt, Artificial Sequence
  source: /note="Description of Artificial Sequence: Synthetic oligonucleotide"
cuggcagaccucuccaucgg

SEQ ID NO: 243 - RNA, 20 nt, Artificial Sequence
  source: /note="Description of Artificial Sequence: Synthetic oligonucleotide"
ggacuggcagaccucuccau

SEQ ID NO: 244 - RNA, 20 nt, Artificial Sequence
  source: /note="Description of Artificial Sequence: Synthetic oligonucleotide"
ucugauuagggugggggcgu

SEQ ID NO: 245 - RNA, 20 nt, Artificial Sequence
  source: /note="Description of Artificial Sequence: Synthetic oligonucleotide"
cacgcccccacccuaaucag

SEQ ID NO: 246 - RNA, 20 nt, Artificial Sequence
  source: /note="Description of Artificial Sequence: Synthetic oligonucleotide"
uuggccucugauuagggugg

SEQ ID NO: 247 - RNA, 20 nt, Artificial Sequence
  source: /note="Description of Artificial Sequence: Synthetic oligonucleotide"
uuuggccucugauuagggug

SEQ ID NO: 248 - RNA, 20 nt, Artificial Sequence
  source: /note="Description of Artificial Sequence: Synthetic oligonucleotide"
guuuggccucugauuagggu

SEQ ID NO: 249 - RNA, 20 nt, Artificial Sequence
  source: /note="Description of Artificial Sequence: Synthetic oligonucleotide"
gguuuggccucugauuaggg

SEQ ID NO: 250 - RNA, 20 nt, Artificial Sequence
  source: /note="Description of Artificial Sequence: Synthetic oligonucleotide"
aaggguuuggccucugauua

SEQ ID NO: 251 - RNA, 20 nt, Artificial Sequence
  source: /note="Description of Artificial Sequence: Synthetic oligonucleotide"
gaaggguuuggccucugauu

SEQ ID NO: 252 - RNA, 20 nt, Artificial Sequence
  source: /note="Description of Artificial Sequence: Synthetic oligonucleotide"
uugcuuuuaucacaggcucc

SEQ ID NO: 253 - RNA, 20 nt, Artificial Sequence
  source: /note="Description of Artificial Sequence: Synthetic oligonucleotide"
cuaacaguugcuuuuaucac

SEQ ID NO: 254 - RNA, 20 nt, Artificial Sequence
  source: /note="Description of Artificial Sequence: Synthetic oligonucleotide"
cuucaaaguuguauugaccc

SEQ ID NO: 255 - RNA, 20 nt, Artificial Sequence
  source: /note="Description of Artificial Sequence: Synthetic oligonucleotide"
acucuuagacauaacacacc

SEQ ID NO: 256 - RNA, 20 nt, Artificial Sequence
  source: /note="Description of Artificial Sequence: Synthetic oligonucleotide"
uagaugccauaucucuuuuc

SEQ ID NO: 257 - RNA, 20 nt, Artificial Sequence
  source: /note="Description of Artificial Sequence: Synthetic oligonucleotide"
cauaggccagaaaagagaua

SEQ ID NO: 258 - RNA, 20 nt, Artificial Sequence
  source: /note="Description of Artificial Sequence: Synthetic oligonucleotide"
ggccuauguuauuaccugua

SEQ ID NO: 259 - RNA, 20 nt, Artificial Sequence
  source: /note="Description of Artificial Sequence: Synthetic oligonucleotide"
guccauacagguaauaacau

SEQ ID NO: 260 - RNA, 20 nt, Artificial Sequence
  source: /note="Description of Artificial Sequence: Synthetic oligonucleotide"
uaccuguauggacuuugcac

SEQ ID NO: 261 - RNA, 20 nt, Artificial Sequence
  source: /note="Description of Artificial Sequence: Synthetic oligonucleotide"
uuccagugcaaaguccauac

SEQ ID NO: 262 - RNA, 20 nt, Artificial Sequence
  source: /note="Description of Artificial Sequence: Synthetic oligonucleotide"
ugcucuuacuuaugcacacc

SEQ ID NO: 263 - RNA, 20 nt, Artificial Sequence
  source: /note="Description of Artificial Sequence: Synthetic oligonucleotide"
gcucuuacuuaugcacaccu

SEQ ID NO: 264 - RNA, 20 nt, Artificial Sequence
  source: /note="Description of Artificial Sequence: Synthetic oligonucleotide"
cucuuacuuaugcacaccug

SEQ ID NO: 265 - RNA, 20 nt, Artificial Sequence
  source: /note="Description of Artificial Sequence: Synthetic oligonucleotide"
cagggcuggcucuaugcccc

SEQ ID NO: 266 - RNA, 20 nt, Artificial Sequence
  source: /note="Description of Artificial Sequence: Synthetic oligonucleotide"
gcugaaaagcgauacagggc

SEQ ID NO: 267 - RNA, 20 nt, Artificial Sequence
  source: /note="Description of Artificial Sequence: Synthetic oligonucleotide"
gauggcugaaaagcgauaca

SEQ ID NO: 268 - RNA, 20 nt, Artificial Sequence
  source: /note="Description of Artificial Sequence: Synthetic oligonucleotide"
agauggcugaaaagcgauac

SEQ ID NO: 269 - RNA, 20 nt, Artificial Sequence
  source: /note="Description of Artificial Sequence: Synthetic oligonucleotide"
gggaguuaucuguagugaga

SEQ ID NO: 270 - RNA, 20 nt, Artificial Sequence
  source: /note="Description of Artificial Sequence: Synthetic oligonucleotide"
aaggcagcuagacaggacuu

SEQ ID NO: 271 - RNA, 20 nt, Artificial Sequence
  source: /note="Description of Artificial Sequence: Synthetic oligonucleotide"
gaaggcagcuagacaggacu

SEQ ID NO: 272 - RNA, 20 nt, Artificial Sequence
  source: /note="Description of Artificial Sequence: Synthetic oligonucleotide"
gauaaggaaggcagcuagac

SEQ ID NO: 273 - RNA, 20 nt, Artificial Sequence
  source: /note="Description of Artificial Sequence: Synthetic oligonucleotide"
cuagcugccuuccuuaucac

SEQ ID NO: 274 - RNA, 20 nt, Artificial Sequence
  source: /note="Description of Artificial Sequence: Synthetic oligonucleotide"
ugggugcuauuccugugaua

SEQ ID NO: 275 - RNA, 20 nt, Artificial Sequence
  source: /note="Description of Artificial Sequence: Synthetic oligonucleotide"
uaucacaggaauagcaccca

SEQ ID NO: 276 - RNA, 20 nt, Artificial Sequence
  source: /note="Description of Artificial Sequence: Synthetic oligonucleotide"
cugagguacugauggaccuu

SEQ ID NO: 277 - RNA, 20 nt, Artificial Sequence
  source: /note="Description of Artificial Sequence: Synthetic oligonucleotide"
ucugagguacugauggaccu

SEQ ID NO: 278 - RNA, 20 nt, Artificial Sequence
  source: /note="Description of Artificial Sequence: Synthetic oligonucleotide"
agcucuggaaugauggcuua

SEQ ID NO: 279 - RNA, 20 nt, Artificial Sequence
  source: /note="Description of Artificial Sequence: Synthetic oligonucleotide"
auuguggagcucuggaauga

SEQ ID NO: 280 - RNA, 20 nt, Artificial Sequence
  source: /note="Description of Artificial Sequence: Synthetic oligonucleotide"
cuggaauagaaaauuggagu

SEQ ID NO: 281 - RNA, 20 nt, Artificial Sequence
  source: /note="Description of Artificial Sequence: Synthetic oligonucleotide"
uggguacggggaacuaagac

SEQ ID NO: 282 - RNA, 20 nt, Artificial Sequence
  source: /note="Description of Artificial Sequence: Synthetic oligonucleotide"
uuaguuccccguacccauca

SEQ ID NO: 283 - RNA, 20 nt, Artificial Sequence
  source: /note="Description of Artificial Sequence: Synthetic oligonucleotide"
uauuuuccuugauggguacg

SEQ ID NO: 284 - RNA, 20 nt, Artificial Sequence
  source: /note="Description of Artificial Sequence: Synthetic oligonucleotide"
auauuuuccuugauggguac

SEQ ID NO: 285 - RNA, 20 nt, Artificial Sequence
  source: /note="Description of Artificial Sequence: Synthetic oligonucleotide"
aauauuuuccuugaugggua

SEQ ID NO: 286 - RNA, 20 nt, Artificial Sequence
  source: /note="Description of Artificial Sequence: Synthetic oligonucleotide"
ggaaggaaaugagaacggaa

SEQ ID NO: 287 - RNA, 20 nt, Artificial Sequence
  source: /note="Description of Artificial Sequence: Synthetic oligonucleotide"
aggaaggaaaugagaacgga

SEQ ID NO: 288 - RNA, 20 nt, Artificial Sequence
  source: /note="Description of Artificial Sequence: Synthetic oligonucleotide"
auacuucaaggccucaauga

SEQ ID NO: 289 - RNA, 20 nt, Artificial Sequence
  source: /note="Description of Artificial Sequence: Synthetic oligonucleotide"
gacuagguagaccuucauug

SEQ ID NO: 290 - RNA, 20 nt, Artificial Sequence
  source: /note="Description of Artificial Sequence: Synthetic oligonucleotide"
uucuucuugcuaaggugacu

SEQ ID NO: 291 - RNA, 20 nt, Artificial Sequence
  source: /note="Description of Artificial Sequence: Synthetic oligonucleotide"
gagauugauucuucuugcua

SEQ ID NO: 292 - RNA, 20 nt, Artificial Sequence
  source: /note="Description of Artificial Sequence: Synthetic oligonucleotide"
guguucuaugagguuggaga

SEQ ID NO: 293 - RNA, 20 nt, Artificial Sequence
  source: /note="Description of Artificial Sequence: Synthetic oligonucleotide"
ggaugaguguucuaugaggu

SEQ ID NO: 294 - RNA, 20 nt, Artificial Sequence
  source: /note="Description of Artificial Sequence: Synthetic oligonucleotide"
caugggaugaguguucuaug

SEQ ID NO: 295 - RNA, 20 nt, Artificial Sequence
  source: /note="Description of Artificial Sequence: Synthetic oligonucleotide"
ugagucagggaguggugcau

SEQ ID NO: 296 - RNA, 20 nt, Artificial Sequence
  source: /note="Description of Artificial Sequence: Synthetic oligonucleotide"
augagucagggaguggugca

SEQ ID NO: 297 - RNA, 20 nt, Artificial Sequence
  source: /note="Description of Artificial Sequence: Synthetic oligonucleotide"
ccacucccugacucauaucu

SEQ ID NO: 298 - RNA, 20 nt, Artificial Sequence
  source: /note="Description of Artificial Sequence: Synthetic oligonucleotide"
uaaggccuagauaugaguca

SEQ ID NO: 299 - RNA, 20 nt, Artificial Sequence
  source: /note="Description of Artificial Sequence: Synthetic oligonucleotide"
guaaggccuagauaugaguc

SEQ ID NO: 300 - RNA, 20 nt, Artificial Sequence
  source: /note="Description of Artificial Sequence: Synthetic oligonucleotide"
auaucuaggccuuacauugc

SEQ ID NO: 301 - RNA, 20 nt, Artificial Sequence
  source: /note="Description of Artificial Sequence: Synthetic oligonucleotide"
aaauuaauuagaggcauaga

SEQ ID NO: 302 - RNA, 20 nt, Artificial Sequence
  source: /note="Description of Artificial Sequence: Synthetic oligonucleotide"
gaaauuaauuagaggcauag

SEQ ID NO: 303 - RNA, 20 nt, Artificial Sequence
  source: /note="Description of Artificial Sequence: Synthetic oligonucleotide"
gaacacaugaaauuaauuag

SEQ ID NO: 304 - RNA, 20 nt, Artificial Sequence
  source: /note="Description of Artificial Sequence: Synthetic oligonucleotide"
ccaaugaguuucuucaauac

SEQ ID NO: 305 - RNA, 20 nt, Artificial Sequence
  source: /note="Description of Artificial Sequence: Synthetic oligonucleotide"
caaauauaauagaagcaagu

SEQ ID NO: 306 - RNA, 20 nt, Artificial Sequence
  source: /note="Description of Artificial Sequence: Synthetic oligonucleotide"
aaauaacuucccuuuuagga

SEQ ID NO: 307 - RNA, 20 nt, Artificial Sequence
  source: /note="Description of Artificial Sequence: Synthetic oligonucleotide"
ggaaaaauaacuucccuuuu

SEQ ID NO: 308 - RNA, 20 nt, Artificial Sequence
  source: /note="Description of Artificial Sequence: Synthetic oligonucleotide"
uuuugaacagaaaugauauu

SEQ ID NO: 309 - RNA, 20 nt, Artificial Sequence
  source: /note="Description of Artificial Sequence: Synthetic oligonucleotide"
aguucaaguagauaucagaa

SEQ ID NO: 310 - RNA, 20 nt, Artificial Sequence
  source: /note="Description of Artificial Sequence: Synthetic oligonucleotide"
aaguucaaguagauaucaga

SEQ ID NO: 311 - RNA, 20 nt, Artificial Sequence
  source: /note="Description of Artificial Sequence: Synthetic oligonucleotide"
ggguggcuguuuaaagaggg

SEQ ID NO: 312 - RNA, 20 nt, Artificial Sequence
  source: /note="Description of Artificial Sequence: Synthetic oligonucleotide"
gugggguggcuguuuaaaga

SEQ ID NO: 313 - RNA, 20 nt, Artificial Sequence
  source: /note="Description of Artificial Sequence: Synthetic oligonucleotide"
ugugggguggcuguuuaaag

SEQ ID NO: 314 - RNA, 20 nt, Artificial Sequence
  source: /note="Description of Artificial Sequence: Synthetic oligonucleotide"
ugccaaccagacugugcgcc

SEQ ID NO: 315 - RNA, 20 nt, Artificial Sequence
  source: /note="Description of Artificial Sequence: Synthetic oligonucleotide"
aaccuggcgcacagucuggu

SEQ ID NO: 316 - RNA, 20 nt, Artificial Sequence
  source: /note="Description of Artificial Sequence: Synthetic oligonucleotide"
aaccagacugugcgccaggu

SEQ ID NO: 317 - RNA, 20 nt, Artificial Sequence
  source: /note="Description of Artificial Sequence: Synthetic oligonucleotide"
uaccaaccuggcgcacaguc

SEQ ID NO: 318 - RNA, 20 nt, Artificial Sequence
  source: /note="Description of Artificial Sequence: Synthetic oligonucleotide"
ucugucagacuuuaccaacc

SEQ ID NO: 319 - RNA, 20 nt, Artificial Sequence
  source: /note="Description of Artificial Sequence: Synthetic oligonucleotide"
auaugugaagcccaacuacg

SEQ ID NO: 320 - RNA, 20 nt, Artificial Sequence
  source: /note="Description of Artificial Sequence: Synthetic oligonucleotide"
aguugcacaaccacguaguu

SEQ ID NO: 321 - RNA, 20 nt, Artificial Sequence
  source: /note="Description of Artificial Sequence: Synthetic oligonucleotide"
gaguugcacaaccacguagu

SEQ ID NO: 322 - RNA, 20 nt, Artificial Sequence
  source: /note="Description of Artificial Sequence: Synthetic oligonucleotide"
cuauagcugacuuucaacca

SEQ ID NO: 323 - RNA, 20 nt, Artificial Sequence
  source: /note="Description of Artificial Sequence: Synthetic oligonucleotide"
aacuucuuugcagaugacca

SEQ ID NO: 324 - RNA, 20 nt, Artificial Sequence
  source: /note="Description of Artificial Sequence: Synthetic oligonucleotide"
uugcauugaggaugcgcagg

SEQ ID NO: 325 - RNA, 20 nt, Artificial Sequence
  source: /note="Description of Artificial Sequence: Synthetic oligonucleotide"
uuuuugcauugaggaugcgc

SEQ ID NO: 326 - RNA, 20 nt, Artificial Sequence
  source: /note="Description of Artificial Sequence: Synthetic oligonucleotide"
gaccucauuuugaugccaga

SEQ ID NO: 327 - RNA, 20 nt, Artificial Sequence
  source: /note="Description of Artificial Sequence: Synthetic oligonucleotide"
ugcccucuggcaucaaaaug

SEQ ID NO: 328 - RNA, 20 nt, Artificial Sequence
  source: /note="Description of Artificial Sequence: Synthetic oligonucleotide"
augccagagggcagcaaaca

SEQ ID NO: 329 - RNA, 20 nt, Artificial Sequence
  source: /note="Description of Artificial Sequence: Synthetic oligonucleotide"
cuguacuuaauagcugaagg

SEQ ID NO: 330 - RNA, 20 nt, Artificial Sequence
  source: /note="Description of Artificial Sequence: Synthetic oligonucleotide"
acuguacuuaauagcugaag

SEQ ID NO: 331 - RNA, 20 nt, Artificial Sequence
  source: /note="Description of Artificial Sequence: Synthetic oligonucleotide"
cagcuauuaaguacaguaaa

SEQ ID NO: 332 - RNA, 20 nt, Artificial Sequence
  source: /note="Description of Artificial Sequence: Synthetic oligonucleotide"
gagcauuucaaaugauaguu

SEQ ID NO: 333 - RNA, 20 nt, Artificial Sequence
  source: /note="Description of Artificial Sequence: Synthetic oligonucleotide"
cauuugaaaugcucccggcc

SEQ ID NO: 334 - RNA, 20 nt, Artificial Sequence
  source: /note="Description of Artificial Sequence: Synthetic oligonucleotide"
uuagggugggggcgugggug

SEQ ID NO: 335 - RNA, 20 nt, Artificial Sequence
  source: /note="Description of Artificial Sequence: Synthetic oligonucleotide"
uuuuaucacaggcuccagga

SEQ ID NO: 336 - RNA, 20 nt, Artificial Sequence
  source: /note="Description of Artificial Sequence: Synthetic oligonucleotide"
uuuaucacaggcuccaggaa

SEQ ID NO: 337 - RNA, 20 nt, Artificial Sequence
  source: /note="Description of Artificial Sequence: Synthetic oligonucleotide"
cacaggcuccaggaaggguu

SEQ ID NO: 338 - RNA, 20 nt, Artificial Sequence
  source: /note="Description of Artificial Sequence: Synthetic oligonucleotide"
aucagaggccaaacccuucc

SEQ ID NO: 339 - RNA, 20 nt, Artificial Sequence
  source: /note="Description of Artificial Sequence: Synthetic oligonucleotide"
cucugauuagggugggggcg

SEQ ID NO: 340 - RNA, 20 nt, Artificial Sequence
  source: /note="Description of Artificial Sequence: Synthetic oligonucleotide"
gauuagggugggggcguggg

SEQ ID NO: 341 - RNA, 20 nt, Artificial Sequence
  source: /note="Description of Artificial Sequence: Synthetic oligonucleotide"
auuagggugggggcgugggu

SEQ ID NO: 342 - RNA, 100 nt, Artificial Sequence
  source: /note="Description of Artificial Sequence: Synthetic polynucleotide"
guuuggccucugauuaggguguuuuagagcuagaaauagcaaguuaaaauaaggcuaguccguuaucaacuugaaaaaguggcaccgagucggugcuuuu

SEQ ID NO: 343 - RNA, 100 nt, Artificial Sequence; identical to SEQ ID NO: 342
  source: /note="Description of Artificial Sequence: Synthetic polynucleotide"

SEQ ID NO: 344 - RNA, 42 nt, Artificial Sequence
  source: /note="Description of Artificial Sequence: Synthetic oligonucleotide"
guuuggccucugauuaggguguuuuagagcuaugcuguuuug

SEQ ID NO: 345 - RNA, 42 nt, Artificial Sequence; identical to SEQ ID NO: 344
  source: /note="Description of Artificial Sequence: Synthetic oligonucleotide"

SEQ ID NO: 346 - RNA, 74 nt, Artificial Sequence
  source: /note="Description of Artificial Sequence: Synthetic oligonucleotide"
aacagcauagcaaguuaaaauaaggcuaguccguuaucaacuugaaaaaguggcaccgagucggugcuuuuuuu

SEQ ID NO: 347 - RNA, 100 nt, Artificial Sequence
  source: /note="Description of Artificial Sequence: Synthetic polynucleotide"
aucagaggccaaacccuuccguuuuagagcuagaaauagcaaguuaaaauaaggcuaguccguuaucaacuugaaaaaguggcaccgagucggugcuuuu

SEQ ID NO: 348 - RNA, 100 nt, Artificial Sequence; identical to SEQ ID NO: 347
  source: /note="Description of Artificial Sequence: Synthetic polynucleotide"

SEQ ID NO: 349 - RNA, 42 nt, Artificial Sequence
  source: /note="Description of Artificial Sequence: Synthetic oligonucleotide"
aucagaggccaaacccuuccguuuuagagcuaugcuguuuug

SEQ ID NO: 350 - RNA, 42 nt, Artificial Sequence; identical to SEQ ID NO: 349
  source: /note="Description of Artificial Sequence: Synthetic oligonucleotide"

SEQ ID NO: 351 - RNA, 100 nt, Artificial Sequence
  source: /note="Description of Artificial Sequence: Synthetic polynucleotide"
uuuaucacaggcuccaggaaguuuuagagcuagaaauagcaaguuaaaauaaggcuaguccguuaucaacuugaaaaaguggcaccgagucggugcuuuu

SEQ ID NO: 352 - RNA, 100 nt, Artificial Sequence; identical to SEQ ID NO: 351
  source: /note="Description of Artificial Sequence: Synthetic polynucleotide"

SEQ ID NO: 353 - RNA, 42 nt, Artificial Sequence
  source: /note="Description of Artificial Sequence: Synthetic oligonucleotide"
uuuaucacaggcuccaggaaguuuuagagcuaugcuguuuug

SEQ ID NO: 354 - RNA, 42 nt, Artificial Sequence; identical to SEQ ID NO: 353
  source: /note="Description of Artificial Sequence: Synthetic oligonucleotide"

SEQ ID NO: 355 - RNA, 100 nt, Artificial Sequence
  source: /note="Description of Artificial Sequence: Synthetic polynucleotide"
uuuggccucugauuagggugguuuuagagcuagaaauagcaaguuaaaauaaggcuaguccguuaucaacuugaaaaaguggcaccgagucggugcuuuu

SEQ ID NO: 356 - RNA, 100 nt, Artificial Sequence; identical to SEQ ID NO: 355
  source: /note="Description of Artificial Sequence: Synthetic polynucleotide"

SEQ ID NO: 357 - RNA, 42 nt, Artificial Sequence
  source: /note="Description of Artificial Sequence: Synthetic oligonucleotide"
uuuggccucugauuagggugguuuuagagcuaugcuguuuug

SEQ ID NO: 358 - RNA, 42 nt, Artificial Sequence; identical to SEQ ID NO: 357
  source: /note="Description of Artificial Sequence: Synthetic oligonucleotide"

SEQ ID NO: 359 - RNA, 100 nt, Artificial Sequence
  source: /note="Description of Artificial Sequence: Synthetic polynucleotide"
cacgcccccacccuaaucagguuuuagagcuagaaauagcaaguuaaaauaaggcuaguccguuaucaacuugaaaaaguggcaccgagucggugcuuuu

SEQ ID NO: 360 - RNA, 100 nt, Artificial Sequence; identical to SEQ ID NO: 359
  source: /note="Description of Artificial Sequence: Synthetic polynucleotide"

SEQ ID NO: 361 - RNA, 42 nt, Artificial Sequence
  source: /note="Description of Artificial Sequence: Synthetic oligonucleotide"
cacgcccccacccuaaucagguuuuagagcuaugcuguuuug

SEQ ID NO: 362 - RNA, 42 nt, Artificial Sequence; identical to SEQ ID NO: 361
  source: /note="Description of Artificial Sequence: Synthetic oligonucleotide"

SEQ ID NO: 363 - RNA, 100 nt, Artificial Sequence
  source: /note="Description of Artificial Sequence: Synthetic polynucleotide"
cacaggcuccaggaaggguuguuuuagagcuagaaauagcaaguuaaaauaaggcuaguccguuaucaacuugaaaaaguggcaccgagucggugcuuuu

SEQ ID NO: 364 - RNA, 100 nt, Artificial Sequence; identical to SEQ ID NO: 363
  source: /note="Description of Artificial Sequence: Synthetic polynucleotide"

SEQ ID NO: 365 - RNA, 42 nt, Artificial Sequence
  source: /note="Description of Artificial Sequence: Synthetic oligonucleotide"
cacaggcuccaggaaggguuguuuuagagcuaugcuguuuug

SEQ ID NO: 366 - RNA, 42 nt, Artificial Sequence; identical to SEQ ID NO: 365
  source: /note="Description of Artificial Sequence: Synthetic oligonucleotide"

SEQ ID NO: 367 - RNA, 100 nt, Artificial Sequence
  source: /note="Description of Artificial Sequence: Synthetic polynucleotide"
uugcuuuuaucacaggcuccguuuuagagcuagaaauagcaaguuaaaauaaggcuaguccguuaucaacuugaaaaaguggcaccgagucggugcuuuu

SEQ ID NO: 368 - RNA, 100 nt, Artificial Sequence; identical to SEQ ID NO: 367
  source: /note="Description of Artificial Sequence: Synthetic polynucleotide"

SEQ ID NO: 369 - RNA, 42 nt, Artificial Sequence
  source: /note="Description of Artificial Sequence: Synthetic oligonucleotide"
uugcuuuuaucacaggcuccguuuuagagcuaugcuguuuug

SEQ ID NO: 370 - RNA, 42 nt, Artificial Sequence; identical to SEQ ID NO: 369
  source: /note="Description of Artificial Sequence: Synthetic oligonucleotide"

SEQ ID NO: 371 - RNA, 100 nt, Artificial Sequence
  source: /note="Description of Artificial Sequence: Synthetic polynucleotide"
uuuuaucacaggcuccaggaguuuuagagcuagaaauagcaaguuaaaauaaggcuaguccguuaucaacuugaaaaaguggcaccgagucggugcuuuu

SEQ ID NO: 372 - RNA, 100 nt, Artificial Sequence; identical to SEQ ID NO: 371
  source: /note="Description of Artificial Sequence: Synthetic polynucleotide"

SEQ ID NO: 373 - RNA, 42 nt, Artificial Sequence
  source: /note="Description of Artificial Sequence: Synthetic oligonucleotide"
uuuuaucacaggcuccaggaguuuuagagcuaugcuguuuug

SEQ ID NO: 374 - RNA, 42 nt, Artificial Sequence; identical to SEQ ID NO: 373
  source: /note="Description of Artificial Sequence: Synthetic oligonucleotide"

SEQ ID NO: 375 - RNA, 100 nt, Artificial Sequence
  source: /note="Description of Artificial Sequence: Synthetic polynucleotide"
acugcugaaagagaugcgguguuuuagagcuagaaauagcaaguuaaaauaaggcuaguccguuaucaacuugaaaaaguggcaccgagucggugcuuuu

SEQ ID NO: 376 - RNA, 100 nt, Artificial Sequence; identical to SEQ ID NO: 375
  source: /note="Description of Artificial Sequence: Synthetic polynucleotide"

SEQ ID NO: 377 - RNA, 42 nt, Artificial Sequence
  source: /note="Description of Artificial Sequence: Synthetic oligonucleotide"
acugcugaaagagaugcgguguuuuagagcuaugcuguuuug

SEQ ID NO: 378 - RNA, 42 nt, Artificial Sequence; identical to SEQ ID NO: 377
  source: /note="Description of Artificial Sequence: Synthetic oligonucleotide"

SEQ ID NO: 379 - RNA, 100 nt, Artificial Sequence
  source: /note="Description of Artificial Sequence: Synthetic polynucleotide"
ugcgguggggagauauguagguuuuagagcuagaaauagcaaguuaaaauaaggcuaguccguuaucaacuugaaaaaguggcaccgagucggugcuuuu

SEQ ID NO: 380 - RNA, 100 nt, Artificial Sequence; identical to SEQ ID NO: 379
  source: /note="Description of Artificial Sequence: Synthetic polynucleotide"

SEQ ID NO: 381 - RNA, 42 nt, Artificial Sequence
  source: /note="Description of Artificial Sequence: Synthetic oligonucleotide"
ugcgguggggagauauguagguuuuagagcuaugcuguuuug

SEQ ID NO: 382 - RNA, 42 nt, Artificial Sequence; identical to SEQ ID NO: 381
  source: /note="Description of Artificial Sequence: Synthetic oligonucleotide"

SEQ ID NO: 383 - RNA, 100 nt, Artificial Sequence
  source: /note="Description of Artificial Sequence: Synthetic polynucleotide"
gaaacaaugaggaccugacuguuuuagagcuagaaauagcaaguuaaaauaaggcuaguccguuaucaacuugaaaaaguggcaccgagucggugcuuuu

SEQ ID NO: 384 - RNA, 100 nt, Artificial Sequence; identical to SEQ ID NO: 383
  source: /note="Description of Artificial Sequence: Synthetic polynucleotide"

SEQ ID NO: 385 - RNA, 42 nt, Artificial Sequence
  source: /note="Description of Artificial Sequence: Synthetic oligonucleotide"
gaaacaaugaggaccugacuguuuuagagcuaugcuguuuug

SEQ ID NO: 386 - RNA, 42 nt, Artificial Sequence; identical to SEQ ID NO: 385
  source: /note="Description of Artificial Sequence: Synthetic oligonucleotide"

SEQ ID NO: 387 - RNA, 100 nt, Artificial Sequence
  source: /note="Description of Artificial Sequence: Synthetic polynucleotide"
guaagcauuuaaguggcuacguuuuagagcuagaaauagcaaguuaaaauaaggcuaguccguuaucaacuugaaaaaguggcaccgagucggugcuuuu

SEQ ID NO: 388 - RNA, 100 nt, Artificial Sequence; identical to SEQ ID NO: 387
  source: /note="Description of Artificial Sequence: Synthetic polynucleotide"

SEQ ID NO: 389 - RNA, 42 nt, Artificial Sequence
  source: /note="Description of Artificial Sequence: Synthetic oligonucleotide"
guaagcauuuaaguggcuacguuuuagagcuaugcuguuuug

SEQ ID NO: 390 - RNA, 42 nt, Artificial Sequence; identical to SEQ ID NO: 389
  source: /note="Description of Artificial Sequence: Synthetic oligonucleotide"

SEQ ID NO: 391 - RNA, 100 nt, Artificial Sequence
  source: /note="Description of Artificial Sequence: Synthetic polynucleotide"
aggcaccucagacucagcauguuuuagagcuagaaauagcaaguuaaaauaaggcuaguccguuaucaacuugaaaaaguggcaccgagucggugcuuuu

SEQ ID NO: 392 - RNA, 100 nt, Artificial Sequence; identical to SEQ ID NO: 391
  source: /note="Description of Artificial Sequence: Synthetic polynucleotide"

SEQ ID NO: 393 - RNA, 42 nt, Artificial Sequence
  source: /note="Description of Artificial Sequence: Synthetic oligonucleotide"
aggcaccucagacucagcauguuuuagagcuaugcuguuuug

SEQ ID NO: 394 - RNA, 42 nt, Artificial Sequence; identical to SEQ ID NO: 393
  source: /note="Description of Artificial Sequence: Synthetic oligonucleotide"

SEQ ID NO: 395 - RNA, 100 nt, Artificial Sequence
  source: /note="Description of Artificial Sequence: Synthetic polynucleotide"
augguaugggagguauacuaguuuuagagcuagaaauagcaaguuaaaauaaggcuaguccguuaucaacuugaaaaaguggcaccgagucggugcuuuu

SEQ ID NO: 396 - RNA, 100 nt, Artificial Sequence; identical to SEQ ID NO: 395
  source: /note="Description of Artificial Sequence: Synthetic polynucleotide"

SEQ ID NO: 397 - RNA, 42 nt, Artificial Sequence
  source: /note="Description of Artificial Sequence: Synthetic oligonucleotide"
augguaugggagguauacuaguuuuagagcuaugcuguuuug

SEQ ID NO: 398 - RNA, 42 nt, Artificial Sequence; identical to SEQ ID NO: 397
  source: /note="Description of Artificial Sequence: Synthetic oligonucleotide"

SEQ ID NO: 399 - skipped

SEQ ID NO: 400 - RNA, 25 nt, Artificial Sequence
  source: /note="Description of Artificial Sequence: Synthetic oligonucleotide"
cagucauuauuuauuaugaauaagc

SEQ ID NO: 401 - RNA, 25 nt, Artificial Sequence
  source: /note="Description of Artificial Sequence: Synthetic oligonucleotide"
ggaaauaauucacaugccaauuauu

SEQ ID NO: 402 - RNA, 25 nt, Artificial Sequence
  source: /note="Description of Artificial Sequence: Synthetic oligonucleotide"
uauuuggcuaucuuuucacuaagcu

SEQ ID NO: 403 - RNA, 25 nt, Artificial Sequence
  source: /note="Description of Artificial Sequence: Synthetic oligonucleotide"
cacuaagcuagguaaucuagccaga

SEQ ID NO: 404 - RNA, 25 nt, Artificial Sequence
  source: /note="Description of Artificial Sequence: Synthetic oligonucleotide"
uaagcuagguaaucuagccagaagg

SEQ ID NO: 405 - RNA, 25 nt, Artificial Sequence
  source: /note="Description of Artificial Sequence: Synthetic oligonucleotide"
uagguaaucuagccagaagguggau

SEQ ID NO: 406 - RNA, 25 nt, Artificial Sequence
  source: /note="Description of Artificial Sequence: Synthetic oligonucleotide"
uaaucuagccagaagguggauaggu

SEQ ID NO: 407 - RNA, 25 nt, Artificial Sequence
  source: /note="Description of Artificial Sequence: Synthetic oligonucleotide"
uggauagguaggauuuuccccacuu

SEQ ID NO: 408 - RNA, 25 nt, Artificial Sequence
  source: /note="Description of Artificial Sequence: Synthetic oligonucleotide"
guaggauuuuccccacuuagguuca

SEQ ID NO: 409 - RNA, 25 nt, Artificial Sequence
  source: /note="Description of Artificial Sequence: Synthetic oligonucleotide"
gccuguaugugaaucuacagcacac

SEQ ID NO: 410 - RNA, 25 nt, Artificial Sequence
  source: /note="Description of Artificial Sequence: Synthetic oligonucleotide"
ugcuauguuguuucuaauucucuuc

SEQ ID NO: 411 - RNA, 25 nt, Artificial Sequence
  source: /note="Description of Artificial Sequence: Synthetic oligonucleotide"
ugagaaaaguucugugcaaauuaac

SEQ ID NO: 412 - RNA, 25 nt, Artificial Sequence
  source: /note="Description of Artificial Sequence: Synthetic oligonucleotide"
gagaaaaguucugugcaaauuaacu

SEQ ID NO: 413 - RNA, 25 nt, Artificial Sequence
  source: /note="Description of Artificial Sequence: Synthetic oligonucleotide"
ccuguuuguagauguaacuuauuug

SEQ ID NO: 414 - RNA, 25 nt, Artificial Sequence
  source: /note="Description of Artificial Sequence: Synthetic oligonucleotide"
aacuuauuuguggcacuaauuucua

SEQ ID NO: 415 - RNA, 25 nt, Artificial Sequence
  source: /note="Description of Artificial Sequence: Synthetic oligonucleotide"
gucugcauuaagauauauuuccuga

SEQ ID NO: 416 - RNA, 25 nt, Artificial Sequence
  source: /note="Description of Artificial Sequence: Synthetic oligonucleotide"
cauuaagauauauuuccugaagguu

SEQ ID NO: 417 - RNA, 25 nt, Artificial Sequence
  source: /note="Description of Artificial Sequence: Synthetic oligonucleotide"
auuaagauauauuuccugaagguuu

SEQ ID NO: 418 - RNA, 25 nt, Artificial Sequence
  source: /note="Description of Artificial Sequence: Synthetic oligonucleotide"
acuacugacauuuaucaccuucuuu

SEQ ID NO: 419 - RNA, 25 nt, Artificial Sequence
  source: /note="Description of Artificial Sequence: Synthetic oligonucleotide"
uuaaaagacaaauucaaauccugca

SEQ ID NO: 420 - RNA, 25 nt, Artificial Sequence
  source: /note="Description of Artificial Sequence: Synthetic oligonucleotide"
caccaaaagcauauauuugaaaaac

SEQ ID NO: 421 - RNA, 25 nt, Artificial Sequence
  source: /note="Description of Artificial Sequence: Synthetic oligonucleotide"
aagcauauauuugaaaaacaggauu

SEQ ID NO: 422 - RNA, 25 nt, Artificial Sequence
  source: /note="Description of Artificial Sequence: Synthetic oligonucleotide"
gcgugccauauuaugcauuauuuaa

SEQ ID NO: 423 - RNA, 25 nt, Artificial Sequence
  source: /note="Description of Artificial Sequence: Synthetic oligonucleotide"
uaugcaaauuauaagucagacaguu

SEQ ID NO: 424 - RNA, 25 nt, Artificial Sequence
  source: /note="Description of Artificial Sequence: Synthetic oligonucleotide"
uugaaaauuuaugccaucugauaag

SEQ ID NO: 425 - RNA, 25 nt, Artificial Sequence
  source: /note="Description of Artificial Sequence: Synthetic oligonucleotide"
aaaucuguuccuccuacccacccga

SEQ ID NO: 426 - RNA, 25 nt, Artificial Sequence
  source: /note="Description of Artificial Sequence: Synthetic oligonucleotide"
aaucuguuccuccuacccacccgau

SEQ ID NO: 427 - RNA, 25 nt, Artificial Sequence
  source: /note="Description of Artificial Sequence: Synthetic oligonucleotide"
uccuacccacccgaugggugucugu

SEQ ID NO: 428 - RNA, 25 nt, Artificial Sequence
  source: /note="Description of Artificial Sequence: Synthetic oligonucleotide"
cacccgaugggugucuguaggaaac

SEQ ID NO: 429 - RNA, 25 nt, Artificial Sequence
  source: /note="Description of Artificial Sequence: Synthetic oligonucleotide"
agacaacauagaauguauagaaaca

SEQ ID NO: 430 - RNA, 25 nt, Artificial Sequence
  source: /note="Description of Artificial Sequence: Synthetic oligonucleotide"
gacaacauagaauguauagaaacaa

SEQ ID NO: 431 - RNA, 25 nt, Artificial Sequence
  source: /note="Description of Artificial Sequence: Synthetic oligonucleotide"
acaacauagaauguauagaaacaag

SEQ ID NO: 432 - RNA, 25 nt, Artificial Sequence
  source: /note="Description of Artificial Sequence: Synthetic oligonucleotide"
cauagaauguauagaaacaaggggu

SEQ ID NO: 433 - RNA, 25 nt, Artificial Sequence
  source: /note="Description of Artificial Sequence: Synthetic oligonucleotide"
auagaauguauagaaacaagggguu

SEQ ID NO: 434 - RNA, 25 nt, Artificial Sequence
  source: /note="Description of Artificial Sequence: Synthetic oligonucleotide"
uagaauguauagaaacaagggguug

SEQ ID NO: 435 - RNA, 25 nt, Artificial Sequence
  source: /note="Description of Artificial Sequence: Synthetic oligonucleotide"
ggacucaugcgcauuuccacaauac

SEQ ID NO: 436 - RNA, 25 nt, Artificial Sequence
  source: /note="Description of Artificial Sequence: Synthetic oligonucleotide"
gcgcauuuccacaauacagguaauu

SEQ ID NO: 437 - RNA, 25 nt, Artificial Sequence
  source: /note="Description of Artificial Sequence: Synthetic oligonucleotide"
auuuccacaauacagguaauuaggu

SEQ ID NO: 438 - RNA, 25 nt, Artificial Sequence
  source: /note="Description of Artificial Sequence: Synthetic oligonucleotide"
ccacaauacagguaauuagguuggc

SEQ ID NO: 439 - RNA, 25 nt, Artificial Sequence
  source: /note="Description of Artificial Sequence: Synthetic oligonucleotide"
gguaauuagguuggcugguuucaga

SEQ ID NO: 440 - RNA, 25 nt, Artificial Sequence
  source: /note="Description of Artificial Sequence: Synthetic oligonucleotide"
guaauuagguuggcugguuucagaa

SEQ ID NO: 441 - RNA, 25 nt, Artificial Sequence
  source: /note="Description of Artificial Sequence: Synthetic oligonucleotide"
uagguuggcugguuucagaagggcc

SEQ ID NO: 442 - RNA, 25 nt, Artificial Sequence
  source: /note="Description of Artificial Sequence: Synthetic oligonucleotide"
agguuggcugguuucagaagggcca

SEQ ID NO: 443 - RNA, 25 nt, Artificial Sequence
  source: /note="Description of Artificial Sequence: Synthetic oligonucleotide"
gccagggcaucacucaugacagcga

SEQ ID NO: 444 - RNA, 25 nt, Artificial Sequence
  source: /note="Description of Artificial Sequence: Synthetic oligonucleotide"
caucacucaugacagcgauggucca

SEQ ID NO: 445 - RNA, 25 nt, Artificial Sequence
  source: /note="Description of Artificial Sequence: Synthetic oligonucleotide"
aucacucaugacagcgaugguccac

SEQ ID NO: 446 - RNA, 25 nt, Artificial Sequence
  source: /note="Description of Artificial Sequence: Synthetic oligonucleotide"
agcgaugguccacgggcccucucua

SEQ ID NO: 447 - RNA, 25 nt, Artificial Sequence
  source: /note="Description of Artificial Sequence: Synthetic oligonucleotide"
gcgaugguccacgggcccucucuau

SEQ ID NO: 448 - RNA, 25 nt, Artificial Sequence
  source: /note="Description of Artificial Sequence: Synthetic oligonucleotide"
augggacugauucacuguuccaaug

SEQ ID NO: 449 - RNA, 25 nt, Artificial Sequence
  source: /note="Description of Artificial Sequence: Synthetic oligonucleotide"
ugggacugauucacuguuccaaugu

SEQ ID NO: 450 - RNA, 25 nt, Artificial Sequence
  source: /note="Description of Artificial Sequence: Synthetic oligonucleotide"
uuuuuauuaaaaaauauaaauaaaa

SEQ ID NO: 451 - RNA, 25 nt, Artificial Sequence
  source: /note="Description of Artificial Sequence: Synthetic oligonucleotide"
aaaaauauaaauaaaauggcgcugc

SEQ ID NO: 452 - RNA, 25 nt, Artificial Sequence
  source: /note="Description of Artificial Sequence: Synthetic oligonucleotide"
auaaauaaaauggcgcugcaggccu

SEQ ID NO: 453 - RNA, 25 nt, Artificial Sequence
  source: /note="Description of Artificial Sequence: Synthetic oligonucleotide"
auaaaauggcgcugcaggccuaggc

SEQ ID NO: 454 - RNA, 25 nt, Artificial Sequence
  source: /note="Description of Artificial Sequence: Synthetic oligonucleotide"
aauggcgcugcaggccuaggcugga

SEQ ID NO: 455 - RNA, 25 nt, Artificial Sequence
  source: /note="Description of Artificial Sequence: Synthetic oligonucleotide"
caggccuaggcuggaaggacucugc

SEQ ID NO: 456 - RNA, 25 nt, Artificial Sequence
  source: /note="Description of Artificial Sequence: Synthetic oligonucleotide"
ucugcaggacucugucuucgcacaa

SEQ ID NO: 457 - RNA, 25 nt, Artificial Sequence
  source: /note="Description of Artificial Sequence: Synthetic oligonucleotide"
acucugucuucgcacaacggcuucu

SEQ ID NO: 458 - RNA, 25 nt, Artificial Sequence
  source: /note="Description of Artificial Sequence: Synthetic oligonucleotide"
cugucuucgcacaacggcuucuugg

SEQ ID NO: 459 - RNA, 25 nt, Artificial Sequence
  source: /note="Description of Artificial Sequence: Synthetic oligonucleotide"
cugucagaaaacaucacaaacuagc

SEQ ID NO: 460 - RNA, 25 nt, Artificial Sequence
  source: /note="Description of Artificial Sequence: Synthetic oligonucleotide"
gaugacagaccacgcugacgucgac

SEQ ID NO: 461 - RNA, 25 nt, Artificial Sequence
  source: /note="Description of Artificial Sequence: Synthetic oligonucleotide"
augacagaccacgcugacgucgacu

SEQ ID NO: 462 - RNA, 25 nt, Artificial Sequence
  source: /note="Description of Artificial Sequence: Synthetic oligonucleotide"
acagaccacgcugacgucgacuggg

SEQ ID NO: 463 - RNA, 25 nt, Artificial Sequence
  source: /note="Description of Artificial Sequence: Synthetic oligonucleotide"
gggcggcacgcguccaccccacccc

SEQ ID NO: 464 - RNA, 25 nt, Artificial Sequence
  source: /note="Description of Artificial Sequence: Synthetic oligonucleotide"
ggcggcacgcguccaccccaccccu

SEQ ID NO: 465 - RNA, 25 nt, Artificial Sequence
  source: /note="Description of Artificial Sequence: Synthetic oligonucleotide"
gcggcacgcguccaccccaccccug

SEQ ID NO: 466 - RNA, 25 nt, Artificial Sequence
  source: /note="Description of Artificial Sequence: Synthetic oligonucleotide"
cggcacgcguccaccccaccccugg

SEQ ID NO: 467 - RNA, 25 nt, Artificial Sequence
  source: /note="Description of Artificial Sequence: Synthetic oligonucleotide"
gggcuucaaauuuucucagaacuua

SEQ ID NO: 468 - RNA, 25 nt, Artificial Sequence
  source: /note="Description of Artificial Sequence: Synthetic oligonucleotide"
ggcuucaaauuuucucagaacuuaa

SEQ ID NO: 469 - RNA, 25 nt, Artificial Sequence
  source: /note="Description of Artificial Sequence: Synthetic oligonucleotide"
aaacugccacacaucuugagcucuc

SEQ ID NO: 470 - RNA, 25 nt, Artificial Sequence
  source: /note="Description of Artificial Sequence: Synthetic oligonucleotide"
aacugccacacaucuugagcucucu

SEQ ID NO: 471 - RNA, 25 nt, Artificial Sequence
  source: /note="Description of Artificial Sequence: Synthetic oligonucleotide"
ugagcucucuggguacuacgccgaa

SEQ ID NO: 472 - RNA, 25 nt, Artificial Sequence
  source: /note="Description of Artificial Sequence: Synthetic oligonucleotide"
gagcucucuggguacuacgccgaau

SEQ ID NO: 473 - RNA, 25 nt, Artificial Sequence
  source: /note="Description of Artificial Sequence: Synthetic oligonucleotide"
agcucucuggguacuacgccgaaug

SEQ ID NO: 474 - RNA, 25 nt, Artificial Sequence
  source: /note="Description of Artificial Sequence: Synthetic oligonucleotide"
gcucucuggguacuacgccgaaugg

SEQ ID NO: 475 - RNA, 25 nt, Artificial Sequence
  source: /note="Description of Artificial Sequence: Synthetic oligonucleotide"
gggggugugugaagaaccuagaaag

SEQ ID NO: 476 - RNA, 25 nt, Artificial Sequence
  source: /note="Description of Artificial Sequence: Synthetic oligonucleotide"
gugugugaagaaccuagaaagaggu

SEQ ID NO: 477 - RNA, 25 nt, Artificial Sequence
  source: /note="Description of Artificial Sequence: Synthetic oligonucleotide"
gaaccuagaaagagguuggagacag

SEQ ID NO: 478 - RNA, 25 nt, Artificial Sequence
  source: /note="Description of Artificial Sequence: Synthetic oligonucleotide"
cuuagugaaaagauagccaaauaau

SEQ ID NO: 479 - RNA, 25 nt, Artificial Sequence
  source: /note="Description of Artificial Sequence: Synthetic oligonucleotide"
gggaaaauccuaccuauccaccuuc

SEQ ID NO: 480 - RNA, 25 nt, Artificial Sequence
  source: /note="Description of Artificial Sequence: Synthetic oligonucleotide"
cacauacaggccgugaaccuaagug

SEQ ID NO: 481 - RNA, 25 nt, Artificial Sequence
  source: /note="Description of Artificial Sequence: Synthetic oligonucleotide"
ucacauacaggccgugaaccuaagu

SEQ ID NO: 482 - RNA, 25 nt, Artificial Sequence
  source: /note="Description of Artificial Sequence: Synthetic oligonucleotide"
uucacauacaggccgugaaccuaag

SEQ ID NO: 483 - RNA, 25 nt, Artificial Sequence
  source: /note="Description of Artificial Sequence: Synthetic oligonucleotide"
accugugugcuguagauucacauac

SEQ ID NO: 484 - RNA, 25 nt, Artificial Sequence
  source: /note="Description of Artificial Sequence: Synthetic oligonucleotide"
uagaaacaacauagcaaauuaaaau

SEQ ID NO: 485 - RNA, 25 nt, Artificial Sequence
  source: /note="Description of Artificial Sequence: Synthetic oligonucleotide"
ucucaguuugguauuuuuuacugcu

SEQ ID NO: 486 - RNA, 25 nt, Artificial Sequence
  source: /note="Description of Artificial Sequence: Synthetic oligonucleotide"
aauuugcacagaacuuuucucaguu

SEQ ID NO: 487 - RNA, 25 nt, Artificial Sequence
  source: /note="Description of Artificial Sequence: Synthetic oligonucleotide"
acaaacaggugguaaaaauucuuuc

SEQ ID NO: 488 - RNA, 25 nt, Artificial Sequence
  source: /note="Description of Artificial Sequence: Synthetic oligonucleotide"
caaauaaguuacaucuacaaacagg

SEQ ID NO: 489 - RNA, 25 nt, Artificial Sequence
  source: /note="Description of Artificial Sequence: Synthetic oligonucleotide"
ccacaaauaaguuacaucuacaaac

SEQ ID NO: 490 - RNA, 25 nt, Artificial Sequence
  source: /note="Description of Artificial Sequence: Synthetic oligonucleotide"
gauuuuagaggggggaaauuauagg

SEQ ID NO: 491 - RNA, 25 nt, Artificial Sequence
  source: /note="Description of Artificial Sequence: Synthetic oligonucleotide"
gcagauuuuagaggggggaaauuau

SEQ ID NO: 492 - RNA, 25 nt, Artificial Sequence
  source: /note="Description of Artificial Sequence: Synthetic oligonucleotide"
gaaauuuggggcagauuuuagaggg

SEQ ID NO: 493 - RNA, 25 nt, Artificial Sequence
  source: /note="Description of Artificial Sequence: Synthetic oligonucleotide"
ggaaauuuggggcagauuuuagagg

SEQ ID NO: 494 - RNA, 25 nt, Artificial Sequence
  source: /note="Description of Artificial Sequence: Synthetic oligonucleotide"
aggaaauuuggggcagauuuuagag

SEQ ID NO: 495 - RNA, 25 nt, Artificial Sequence
  source: /note="Description of Artificial Sequence: Synthetic oligonucleotide"
caggaaauuuggggcagauuuuaga

SEQ ID NO: 496 - RNA, 25 nt, Artificial Sequence
  source: /note="Description of Artificial Sequence: Synthetic oligonucleotide"
ucaggaaauuuggggcagauuuuag

SEQ ID NO: 497 - RNA, 25 nt, Artificial Sequence
  source: /note="Description of Artificial Sequence: Synthetic oligonucleotide"
uuuaguacuuacaucaggaaauuug

SEQ ID NO: 498 - RNA, 25 nt, Artificial Sequence
  source: /note="Description of Artificial Sequence: Synthetic oligonucleotide"
cuuuaguacuuacaucaggaaauuu

SEQ ID NO: 499 - RNA, 25 nt, Artificial Sequence
  source: /note="Description of Artificial Sequence: Synthetic oligonucleotide"
ucuuuaguacuuacaucaggaaauu

SEQ ID NO: 500 - RNA, 25 nt, Artificial Sequence
  source: /note="Description of Artificial Sequence: Synthetic oligonucleotide"
auaaaacuucuuuaguacuuacauc

SEQ ID NO: 501 - RNA, 25 nt, Artificial Sequence
  source: /note="Description of Artificial Sequence: Synthetic oligonucleotide"
ucuaauuuuagguucccaaaccuuc

SEQ ID NO: 502 - RNA, 25 nt, Artificial Sequence
  source: /note="Description of Artificial Sequence: Synthetic oligonucleotide"
guuucuuauuaaauauucuaauuuu

SEQ ID NO: 503 - RNA, 25 nt, Artificial Sequence
  source: /note="Description of Artificial Sequence: Synthetic oligonucleotide"
cugggcgagcgguaaauccuaaaga

SEQ ID NO: 504 - RNA, 25 nt, Artificial Sequence
  source: /note="Description of Artificial Sequence: Synthetic oligonucleotide"
uuaggaaagaacaucacugggcgag

SEQ ID NO: 505 - RNA, 25 nt, Artificial Sequence
  source: /note="Description of Artificial Sequence: Synthetic oligonucleotide"
auuuagcuuaggaaagaacaucacu

SEQ ID NO: 506 - RNA, 25 nt, Artificial Sequence
  source: /note="Description of Artificial Sequence: Synthetic oligonucleotide"
aauuuagcuuaggaaagaacaucac

SEQ ID NO: 507 - RNA, 25 nt, Artificial Sequence
  source: /note="Description of Artificial Sequence: Synthetic oligonucleotide"
uugaauuugucuuuuaauuuagcuu

SEQ ID NO: 508 - RNA, 25 nt, Artificial Sequence
  source: /note="Description of Artificial Sequence: Synthetic oligonucleotide"
uauaugcuuuugguggcuaccaugc

SEQ ID NO: 509 - RNA, 25 nt, Artificial Sequence
  source: /note="Description of Artificial Sequence: Synthetic oligonucleotide"
cuguuuuucaaauauaugcuuuugg

SEQ ID NO: 510 - RNA, 25 nt, Artificial Sequence
  source: /note="Description of Artificial Sequence: Synthetic oligonucleotide"
auccuguuuuucaaauauaugcuuu

SEQ ID NO: 511 - RNA, 25 nt, Artificial Sequence
  source: /note="Description of Artificial Sequence: Synthetic oligonucleotide"
gcauaccauuaaauaaugcauaaua

SEQ ID NO: 512 - RNA, 25 nt, Artificial Sequence
  source: /note="Description of Artificial Sequence: Synthetic oligonucleotide"
auugcuguuuauuaaugcugaagug

SEQ ID NO: 513 - RNA, 25 nt, Artificial Sequence
  source: /note="Description of Artificial Sequence: Synthetic oligonucleotide"
caaggagaaucaaaaugcaaaacuu

SEQ ID NO: 514 - RNA, 25 nt, Artificial Sequence
  source: /note="Description of Artificial Sequence: Synthetic oligonucleotide"
ucaaggagaaucaaaaugcaaaacu

SEQ ID NO: 515 - RNA, 25 nt, Artificial Sequence
  source: /note="Description of Artificial Sequence: Synthetic oligonucleotide"
gcuuaucagauggcauaaauuuuca

SEQ ID NO: 516 - RNA, 25 nt, Artificial Sequence
  source: /note="Description of Artificial Sequence: Synthetic oligonucleotide"
gggaacuagguuaccgcuuaucaga

SEQ ID NO: 517 - RNA, 25 nt, Artificial Sequence
  source: /note="Description of Artificial Sequence: Synthetic oligonucleotide"
gggcaggagauguaggaggggaacu

SEQ ID NO: 518 - RNA, 25 nt, Artificial Sequence
  source: /note="Description of Artificial Sequence: Synthetic oligonucleotide"
gagaaaugggcaggagauguaggag

SEQ ID NO: 519 - RNA, 25 nt, Artificial Sequence
  source: /note="Description of Artificial Sequence: Synthetic oligonucleotide"
ugagaaaugggcaggagauguagga

SEQ ID NO: 520 - RNA, 25 nt, Artificial Sequence
  source: /note="Description of Artificial Sequence: Synthetic oligonucleotide"
uugagaaaugggcaggagauguagg

SEQ ID NO: 521 - RNA, 25 nt, Artificial Sequence
  source: /note="Description of Artificial Sequence: Synthetic oligonucleotide"
gauuugagaaaugggcaggagaugu

SEQ ID NO: 522 - RNA, 25 nt, Artificial Sequence
  source: /note="Description of Artificial Sequence: Synthetic oligonucleotide"
ggaggaacagauuugagaaaugggc

SEQ ID NO: 523 - RNA, 25 nt, Artificial Sequence
  source: /note="Description of Artificial Sequence: Synthetic oligonucleotide"
gguaggaggaacagauuugagaaau

SEQ ID NO: 524 - RNA, 25 nt, Artificial Sequence
  source: /note="Description of Artificial Sequence: Synthetic oligonucleotide"
ggguaggaggaacagauuugagaaa

SEQ ID NO: 525 - RNA, 25 nt, Artificial Sequence
  source: /note="Description of Artificial Sequence: Synthetic oligonucleotide"
uacagacacccaucggguggguagg

SEQ ID NO: 526 - RNA, 25 nt, Artificial Sequence
  source: /note="Description of Artificial Sequence: Synthetic oligonucleotide"
uccuacagacacccaucgggugggu

SEQ ID NO: 527 - RNA, 25 nt, Artificial Sequence
  source: /note="Description of Artificial Sequence: Synthetic oligonucleotide"
uguuuccuacagacacccaucgggu

SEQ ID NO: 528 - RNA, 25 nt, Artificial Sequence
  source: /note="Description of Artificial Sequence: Synthetic oligonucleotide"
cuguuuccuacagacacccaucggg

SEQ ID NO: 529 - RNA, 25 nt, Artificial Sequence
  source: /note="Description of Artificial Sequence: Synthetic oligonucleotide"
uaccuguuuccuacagacacccauc

SEQ ID NO: 530 - RNA, 25 nt, Artificial Sequence
  source: /note="Description of Artificial Sequence: Synthetic oligonucleotide"
guaccuguuuccuacagacacccau

SEQ ID NO: 531 - RNA, 25 nt, Artificial Sequence
  source: /note="Description of Artificial Sequence: Synthetic oligonucleotide"
aauuuuuaaugcuuauaagacaaug

SEQ ID NO: 532 - RNA, 25 nt, Artificial Sequence
  source: /note="Description of Artificial Sequence: Synthetic oligonucleotide"
acacaauaaauguuggagcuuuagg

SEQ ID NO: 533 - RNA, 25 nt, Artificial Sequence
  source: /note="Description of Artificial Sequence: Synthetic oligonucleotide"
uugacacaauaaauguuggagcuuu

SEQ ID NO: 534 - RNA, 25 nt, Artificial Sequence
  source: /note="Description of Artificial Sequence: Synthetic oligonucleotide"
ugcuuaacauugacacaauaaaugu

SEQ ID NO: 535 - RNA, 25 nt, Artificial Sequence
  source: /note="Description of Artificial Sequence: Synthetic oligonucleotide"
ccagccaaccuaauuaccuguauug

SEQ ID NO: 536 - RNA, 25 nt, Artificial Sequence
  source: /note="Description of Artificial Sequence: Synthetic oligonucleotide"
accaucgcugucaugagugaugccc

SEQ ID NO: 537 - RNA, 25 nt, Artificial Sequence
  source: /note="Description of Artificial Sequence: Synthetic oligonucleotide"
gaaucagucccauagagagggcccg

SEQ ID NO: 538 - RNA, 25 nt, Artificial Sequence
  source: /note="Description of Artificial Sequence: Synthetic oligonucleotide"
gaacagugaaucagucccauagaga

SEQ ID NO: 539 - RNA, 25 nt, Artificial Sequence
  source: /note="Description of Artificial Sequence: Synthetic oligonucleotide"
ggaacagugaaucagucccauagag

SEQ ID NO: 540 - RNA, 25 nt, Artificial Sequence
  source: /note="Description of Artificial Sequence: Synthetic oligonucleotide"
uaaaaacaaaaaaacagacccacau

SEQ ID NO: 541 - RNA, 25 nt, Artificial Sequence
  source: /note="Description of Artificial Sequence: Synthetic oligonucleotide"
gaguccugcagaguccuuccagccu

SEQ ID NO: 542 - RNA, 25 nt, Artificial Sequence
  source: /note="Description of Artificial Sequence: Synthetic oligonucleotide"
gcgugccgcccagucgacgucagcg

SEQ ID NO: 543 - RNA, 25 nt, Artificial Sequence
  source: /note="Description of Artificial Sequence: Synthetic oligonucleotide"
aaauuugaagcccccaggggugggg

SEQ ID NO: 544 - RNA, 25 nt, Artificial Sequence
  source: /note="Description of Artificial Sequence: Synthetic oligonucleotide"
agaaaauuugaagcccccaggggug

SEQ ID NO: 545 - RNA, 25 nt, Artificial Sequence
  source: /note="Description of Artificial Sequence: Synthetic oligonucleotide"
gagaaaauuugaagcccccaggggu

SEQ ID NO: 546 - RNA, 25 nt, Artificial Sequence
  source: /note="Description of Artificial Sequence: Synthetic oligonucleotide"
ugagaaaauuugaagcccccagggg

SEQ ID NO: 547 - RNA, 25 nt, Artificial Sequence
  source: /note="Description of Artificial Sequence: Synthetic oligonucleotide"
uucugagaaaauuugaagcccccag

SEQ ID NO: 548 - RNA, 25 nt, Artificial Sequence
  source: /note="Description of Artificial Sequence: Synthetic oligonucleotide"
guucugagaaaauuugaagccccca

SEQ ID NO: 549 - RNA, 25 nt, Artificial Sequence
  source: /note="Description of Artificial Sequence: Synthetic oligonucleotide"
aguucugagaaaauuugaagccccc

SEQ ID NO: 550 - RNA, 25 nt, Artificial Sequence
  source: /note="Description of Artificial Sequence: Synthetic oligonucleotide"
cucaagauguguggcaguuuucgga

SEQ ID NO: 551 - RNA, 25 nt, Artificial Sequence
  source: /note="Description of Artificial Sequence: Synthetic oligonucleotide"
agagcucaagauguguggcaguuuu

SEQ ID NO: 552 - RNA, 25 nt, Artificial Sequence
  source: /note="Description of Artificial Sequence: Synthetic oligonucleotide"
uaguacccagagagcucaagaugug

SEQ ID NO: 553 - RNA, 25 nt, Artificial Sequence
  source: /note="Description of Artificial Sequence: Synthetic oligonucleotide"
ucuagguucuucacacacccccauu

SEQ ID NO: 554 - RNA, 25 nt, Artificial Sequence
  source: /note="Description of Artificial Sequence: Synthetic oligonucleotide"
uuaauuuuuuuuauuuuuucaauaa

SEQ ID NO: 555 - RNA, 25 nt, Artificial Sequence
  source: /note="Description of Artificial Sequence: Synthetic oligonucleotide"
uaauuuuuuuuauuuuuucaauaaa

SEQ ID NO: 556 - RNA, 25 nt, Artificial Sequence
  source: /note="Description of Artificial Sequence: Synthetic oligonucleotide"
uuauuuuuucaauaaagggacaaaa

SEQ ID NO: 557 - RNA, 25 nt, Artificial Sequence
  source: /note="Description of Artificial Sequence: Synthetic oligonucleotide"
uauuuuuucaauaaagggacaaaau

SEQ ID NO: 558 - RNA, 25 nt, Artificial Sequence
  source: /note="Description of Artificial Sequence: Synthetic oligonucleotide"
aaagggacaaaauggguguaugaac

SEQ ID NO: 559 - RNA, 25 nt, Artificial Sequence
  source: /note="Description of Artificial Sequence: Synthetic oligonucleotide"
acaacugccaaaaaaacacagacag

SEQ ID NO: 560 - RNA, 25 nt, Artificial Sequence
  source: /note="Description of Artificial Sequence: Synthetic oligonucleotide"
ccagaaacaaauacaauaaaaagcc

SEQ ID NO: 561 - RNA, 25 nt, Artificial Sequence
  source: /note="Description of Artificial Sequence: Synthetic oligonucleotide"
uaaaaagccagguuguaaugaccuu

SEQ ID NO: 562 - RNA, 25 nt, Artificial Sequence
  source: /note="Description of Artificial Sequence: Synthetic oligonucleotide"
caaauuaagugccucuguuuugaac

SEQ ID NO: 563 - RNA, 25 nt, Artificial Sequence
  source: /note="Description of Artificial Sequence: Synthetic oligonucleotide"
aaauuaagugccucuguuuugaaca

SEQ ID NO: 564 - RNA, 25 nt, Artificial Sequence
  source: /note="Description of Artificial Sequence: Synthetic oligonucleotide"
aguuacgacaaacagcuuucauuac

SEQ ID NO: 565 - RNA, 25 nt, Artificial Sequence
  source: /note="Description of Artificial Sequence: Synthetic oligonucleotide"
acagcuuucauuacaggaauagaaa

SEQ ID NO: 566 - RNA, 25 nt, Artificial Sequence
  source: /note="Description of Artificial Sequence: Synthetic oligonucleotide"
auuuacaaaaaaguauugacuaaag

SEQ ID NO: 567 - RNA, 25 nt, Artificial Sequence
  source: /note="Description of Artificial Sequence: Synthetic oligonucleotide"
uuuacaaaaaaguauugacuaaagc

SEQ ID NO: 568 - RNA, 25 nt, Artificial Sequence
  source: /note="Description of Artificial Sequence: Synthetic oligonucleotide"
uaaauauaaagcaccauuuaguuuu

SEQ ID NO: 569 - RNA, 25 nt, Artificial Sequence
  source: /note="Description of Artificial Sequence: Synthetic oligonucleotide"
ggcaaugaaaaaaacugcaaaacau

SEQ ID NO: 570 - RNA, 25 nt, Artificial Sequence
  source: /note="Description of Artificial Sequence: Synthetic oligonucleotide"
ucuuucuuucuuuuacugcauauga

SEQ ID NO: 571 - RNA, 25 nt, Artificial Sequence
  source: /note="Description of Artificial Sequence: Synthetic oligonucleotide"
uuuacugcauaugaagguaagaugc

SEQ ID NO: 572 - RNA, 25 nt, Artificial Sequence
  source: /note="Description of Artificial Sequence: Synthetic oligonucleotide"
auaugaagguaagaugcuggaaugu

SEQ ID NO: 573 - RNA, 25 nt, Artificial Sequence
  source: /note="Description of Artificial Sequence: Synthetic oligonucleotide"
uaugaagguaagaugcuggaaugua

SEQ ID NO: 574 - RNA, 25 nt, Artificial Sequence
  source: /note="Description of Artificial Sequence: Synthetic oligonucleotide"
agaugcuggaauguagggugauaga

SEQ ID NO: 575 - RNA, 25 nt, Artificial Sequence
  source: /note="Description of Artificial Sequence: Synthetic oligonucleotide"
cuggaauguagggugauagaaggaa

SEQ ID NO: 576 - RNA, 25 nt, Artificial Sequence
  source: /note="Description of Artificial Sequence: Synthetic oligonucleotide"
uggaauguagggugauagaaggaaa

SEQ ID NO: 577 - RNA, 25 nt, Artificial Sequence
  source: /note="Description of Artificial Sequence: Synthetic oligonucleotide"
uuagcuugcaguacugcauacagua

SEQ ID NO: 578 - RNA, 25 nt, Artificial Sequence
  source: /note="Description of Artificial Sequence: Synthetic oligonucleotide"
gcaguacugcauacaguauggcagc

SEQ ID NO: 579 - RNA, 25 nt, Artificial Sequence
  source: /note="Description of Artificial Sequence: Synthetic oligonucleotide"
ugcauacaguauggcagcaggaaaa

SEQ ID NO: 580 - RNA, 25 nt, Artificial Sequence
  source: /note="Description of Artificial Sequence: Synthetic oligonucleotide"
uggcagcaggaaaaaggaacaaaaa

SEQ ID NO: 581 - RNA, 25 nt, Artificial Sequence
  source: /note="Description of Artificial Sequence: Synthetic oligonucleotide"
acagccauccaugugacauucuagc

SEQ ID NO: 582 - RNA, 25 nt, Artificial Sequence
  source: /note="Description of Artificial Sequence: Synthetic oligonucleotide"
caggcucccccaaaccgccauuaua

SEQ ID NO: 583 - RNA, 25 nt, Artificial Sequence
  source: /note="Description of Artificial Sequence: Synthetic oligonucleotide"
ccugccaaauuaaaaaaauauacug

SEQ ID NO: 584 - RNA, 25 nt, Artificial Sequence
  source: /note="Description of Artificial Sequence: Synthetic oligonucleotide"
ucuuuuuuuuuuccacuaccaaaaa

SEQ ID NO: 585 - RNA, 25 nt, Artificial Sequence
  source: /note="Description of Artificial Sequence: Synthetic oligonucleotide"
aaagaccauaaauguauuuuagcau

SEQ ID NO: 586 - RNA, 25 nt, Artificial Sequence
  source: /note="Description of Artificial Sequence: Synthetic oligonucleotide"
uuuuuuuuuuuuacaaccugaagag

SEQ ID NO: 587 - RNA, 25 nt, Artificial Sequence
  source: /note="Description of Artificial Sequence: Synthetic oligonucleotide"
caaccugaagagcgguguguaucca

SEQ ID NO: 588 - RNA, 25 nt, Artificial Sequence
  source: /note="Description of Artificial Sequence: Synthetic oligonucleotide"
uagaauuuccacuaccauuuuuaaa

SEQ ID NO: 589 - RNA, 25 nt, Artificial Sequence
  source: /note="Description of Artificial Sequence: Synthetic oligonucleotide"
aagucuuguaacaccaccaagacaa

SEQ ID NO: 590 - RNA, 25 nt, Artificial Sequence
  source: /note="Description of Artificial Sequence: Synthetic oligonucleotide"
uaaguaagcucaauagucaaguaaa

SEQ ID NO: 591 - RNA, 25 nt, Artificial Sequence
  source: /note="Description of Artificial Sequence: Synthetic oligonucleotide"
uaagcucaauagucaaguaaauggc

SEQ ID NO: 592 - RNA, 25 nt, Artificial Sequence
  source: /note="Description of Artificial Sequence: Synthetic oligonucleotide"
uucccuuaaguauagaccuguaaac

SEQ ID NO: 593 - RNA, 25 nt, Artificial Sequence
  source: /note="Description of Artificial Sequence: Synthetic oligonucleotide"
ucccuuaaguauagaccuguaaacu

SEQ ID NO: 594 - RNA, 25 nt, Artificial Sequence
  source: /note="Description of Artificial Sequence: Synthetic oligonucleotide"
gugcacuuaauuguccuaucugagc

SEQ ID NO: 595 - RNA, 25 nt, Artificial Sequence
  source: /note="Description of Artificial Sequence: Synthetic oligonucleotide"
auuagagaaaagauacagauaucac

SEQ ID NO: 596 - RNA, 25 nt, Artificial Sequence
  source: /note="Description of Artificial Sequence: Synthetic oligonucleotide"
agucaagugcuauuugaacaccaac

SEQ ID NO: 597 - RNA, 25 nt, Artificial Sequence
  source: /note="Description of Artificial Sequence: Synthetic oligonucleotide"
gucaagugcuauuugaacaccaacu

SEQ ID NO: 598 - RNA, 25 nt, Artificial Sequence
  source: /note="Description of Artificial Sequence: Synthetic oligonucleotide"
ucaagugcuauuugaacaccaacug

SEQ ID NO: 599 - RNA, 25 nt, Artificial Sequence
  source: /note="Description of Artificial Sequence: Synthetic oligonucleotide"
guuaacacaaauagcacacagugua

SEQ ID NO: 600 - RNA, 25 nt, Artificial Sequence
  source: /note="Description of Artificial Sequence: Synthetic oligonucleotide"
ggaaaagaaaugaaguacaacuuuu

SEQ ID NO: 601 - RNA, 25 nt, Artificial Sequence
  source: /note="Description of Artificial Sequence: Synthetic oligonucleotide"
gaaaagaaaugaaguacaacuuuua

SEQ ID NO: 602 - RNA, 25 nt, Artificial Sequence
  source: /note="Description of Artificial Sequence: Synthetic oligonucleotide"
cuuauauaccuguucuaguuuuaaa

SEQ ID NO: 603 - RNA, 25 nt, Artificial Sequence
  source: /note="Description of Artificial Sequence: Synthetic oligonucleotide"
uauugucagccucuuccuuucaaua

SEQ ID NO: 604 - RNA, 25 nt, Artificial Sequence
  source: /note="Description of Artificial Sequence: Synthetic oligonucleotide"
ccucuuccuuucaauaugguauaca

SEQ ID NO: 605 - RNA, 25 nt, Artificial Sequence
  source: /note="Description of Artificial Sequence: Synthetic oligonucleotide"
uguccacuugacaaccaaguagauc

SEQ ID NO: 606 - RNA, 25 nt, Artificial Sequence
  source: /note="Description of Artificial Sequence: Synthetic oligonucleotide"
caaguagaucuggaucuauuucuuu

SEQ ID NO: 607 - RNA, 25 nt, Artificial Sequence
  source: /note="Description of Artificial Sequence: Synthetic oligonucleotide"
uuacuaguguauuuaauugcguucc

SEQ ID NO: 608 - RNA, 25 nt, Artificial Sequence
  source: /note="Description of Artificial Sequence: Synthetic oligonucleotide"
uacuaguguauuuaauugcguucca

SEQ ID NO: 609 - RNA, 25 nt, Artificial Sequence
  source: /note="Description of Artificial Sequence: Synthetic oligonucleotide"
ucauuguuuaaaaaaaauaaaacuu

SEQ ID NO: 610 - RNA, 25 nt, Artificial Sequence
  source: /note="Description of Artificial Sequence: Synthetic oligonucleotide"
cauuguuuaaaaaaaauaaaacuuu

SEQ ID NO: 611 - RNA, 25 nt, Artificial Sequence
  source: /note="Description of Artificial Sequence: Synthetic oligonucleotide"
agcccauuucuuuuaagcucucacc

SEQ ID NO: 612 - RNA, 25 nt, Artificial Sequence
  source: /note="Description of Artificial Sequence: Synthetic oligonucleotide"
accaggagcaaaguagcuuuuauac

SEQ ID NO: 613 - RNA, 25 nt, Artificial Sequence
  source: /note="Description of Artificial Sequence: Synthetic oligonucleotide"
aguuuuguuuauaaaauuaaacuaa

SEQ ID NO: 614 - RNA, 25 nt, Artificial Sequence
  source: /note="Description of Artificial Sequence: Synthetic oligonucleotide"
acuaaaggaaaaaugaugauuaacu

SEQ ID NO: 615 - RNA, 25 nt, Artificial Sequence
  source: /note="Description of Artificial Sequence: Synthetic oligonucleotide"
aaaaugaugauuaacuaggacauaa

SEQ ID NO: 616 - RNA, 25 nt, Artificial Sequence
  source: /note="Description of Artificial Sequence: Synthetic oligonucleotide"
aaaugaugauuaacuaggacauaau

SEQ ID NO: 617 - RNA, 25 nt, Artificial Sequence
  source: /note="Description of Artificial Sequence: Synthetic oligonucleotide"
cuaggacauaaugggucaucuuuuu

SEQ ID NO: 618 - RNA, 25 nt, Artificial Sequence
  source: /note="Description of Artificial Sequence: Synthetic oligonucleotide"
auauagaauuauaugcuaguuccua

SEQ ID NO: 619 - RNA, 25 nt, Artificial Sequence
  source: /note="Description of Artificial Sequence: Synthetic oligonucleotide"
uaacaaguagaaagaaccaucgaug

SEQ ID NO: 620 - RNA, 25 nt, Artificial Sequence
  source: /note="Description of Artificial Sequence: Synthetic oligonucleotide"
caucgaugugguuuuaauagaucca

SEQ ID NO: 621 - RNA, 25 nt, Artificial Sequence
  source: /note="Description of Artificial Sequence: Synthetic oligonucleotide"
guuuuucuguuaauuugucaauuca

SEQ ID NO: 622 - RNA, 25 nt, Artificial Sequence
  source: /note="Description of Artificial Sequence: Synthetic oligonucleotide"
ucagugcuaucuauucugucuauag

SEQ ID NO: 623 - RNA, 25 nt, Artificial Sequence
  source: /note="Description of Artificial Sequence: Synthetic oligonucleotide"
cagugcuaucuauucugucuauaga

SEQ ID NO: 624 - RNA, 25 nt, Artificial Sequence
  source: /note="Description of Artificial Sequence: Synthetic oligonucleotide"
uauguauuacagaauguaugcagca

SEQ ID NO: 625 - RNA, 25 nt, Artificial Sequence
  source: /note="Description of Artificial Sequence: Synthetic oligonucleotide"
cucucucucucuuuuucucucagaa

SEQ ID NO: 626 - RNA, 25 nt, Artificial Sequence
  source: /note="Description of Artificial Sequence: Synthetic oligonucleotide"
cucucuuuuucucucagaacggaac

SEQ ID NO: 627 - RNA, 25 nt, Artificial Sequence
  source: /note="Description of Artificial Sequence: Synthetic oligonucleotide"
caacauguuugcucagcaacgaauu

SEQ ID NO: 628 - RNA, 25 nt, Artificial Sequence
  source: /note="Description of Artificial Sequence: Synthetic oligonucleotide"
aacauguuugcucagcaacgaauua

SEQ ID NO: 629 - RNA, 25 nt, Artificial Sequence
  source: /note="Description of Artificial Sequence: Synthetic oligonucleotide"
acauguaaauuauugcacaagagaa

SEQ ID NO: 630 - RNA, 25 nt, Artificial Sequence
  source: /note="Description of Artificial Sequence: Synthetic oligonucleotide"
gccccauacagaucaugcauucaaa

SEQ ID NO: 631 - RNA, 25 nt, Artificial Sequence
  source: /note="Description of Artificial Sequence: Synthetic oligonucleotide"
augcauucaaacggugagaacauaa

SEQ ID NO: 632 - RNA, 25 nt, Artificial Sequence
  source: /note="Description of Artificial Sequence: Synthetic oligonucleotide"
aaagaaaaagaaaaagaaaaaaaac

SEQ ID NO: 633 - RNA, 25 nt, Artificial Sequence
  source: /note="Description of Artificial Sequence: Synthetic oligonucleotide"
agaaaaagaaaaaaaacaggugugc

SEQ ID NO: 634 - RNA, 25 nt, Artificial Sequence
  source: /note="Description of Artificial Sequence: Synthetic oligonucleotide"
uguuuguuuguuuguuuaaaucaca

SEQ ID NO: 635 - RNA, 25 nt, Artificial Sequence
  source: /note="Description of Artificial Sequence: Synthetic oligonucleotide"
guuuguuuguuuguuuaaaucacau

SEQ ID NO: 636 - RNA, 25 nt, Artificial Sequence
  source: /note="Description of Artificial Sequence: Synthetic oligonucleotide"
acaugggacuagaaaaaaauccuac

SEQ ID NO: 637 - RNA, 25 nt, Artificial Sequence
  source: /note="Description of Artificial Sequence: Synthetic oligonucleotide"
caugggacuagaaaaaaauccuaca

SEQ ID NO: 638 - RNA, 25 nt, Artificial Sequence
  source: /note="Description of Artificial Sequence: Synthetic oligonucleotide"
gacuagaaaaaaauccuacagggag

SEQ ID NO: 639 - RNA, 25 nt, Artificial Sequence
  source: /note="Description of Artificial Sequence: Synthetic oligonucleotide"
acuagaaaaaaauccuacagggagu

SEQ ID NO: 640 - RNA, 25 nt, Artificial Sequence
  source: /note="Description of Artificial Sequence: Synthetic oligonucleotide"
cuagaaaaaaauccuacagggagug

SEQ ID NO: 641 - RNA, 25 nt, Artificial Sequence
  source: /note="Description of Artificial Sequence: Synthetic oligonucleotide"
aaaaaaauccuacagggaguggggc

SEQ ID NO: 642 - RNA, 25 nt, Artificial Sequence
  source: /note="Description of Artificial Sequence: Synthetic oligonucleotide"
aaaauccuacagggaguggggcugg

SEQ ID NO: 643 - RNA, 25 nt, Artificial Sequence
  source: /note="Description of Artificial Sequence: Synthetic oligonucleotide"
aaauccuacagggaguggggcugga

SEQ ID NO: 644 - RNA, 25 nt, Artificial Sequence
  source: /note="Description of Artificial Sequence: Synthetic oligonucleotide"
uacagggaguggggcuggagggcga

SEQ ID NO: 645 - RNA, 25 nt, Artificial Sequence
  source: /note="Description of Artificial Sequence: Synthetic oligonucleotide"
acagggaguggggcuggagggcgau

SEQ ID NO: 646 - RNA, 25 nt, Artificial Sequence
  source: /note="Description of Artificial Sequence: Synthetic oligonucleotide"
cagggaguggggcuggagggcgaug

SEQ ID NO: 647 - RNA, 25 nt, Artificial Sequence
  source: /note="Description of Artificial Sequence: Synthetic oligonucleotide"
gaguggggcuggagggcgaugggga

SEQ ID NO: 648 - RNA, 25 nt, Artificial Sequence
  source: /note="Description of Artificial Sequence: Synthetic oligonucleotide"
aguggggcuggagggcgauggggaa

SEQ ID NO: 649 - RNA, 25 nt, Artificial Sequence
  source: /note="Description of Artificial Sequence: Synthetic oligonucleotide"
guggggcuggagggcgauggggaag

SEQ ID NO: 650 - RNA, 25 nt, Artificial Sequence
  source: /note="Description of Artificial Sequence: Synthetic oligonucleotide"
gcuggagggcgauggggaaggggag

SEQ ID NO: 651 - RNA, 25 nt, Artificial Sequence
  source: /note="Description of Artificial Sequence: Synthetic oligonucleotide"
cgauggggaaggggaguggugaaaa

SEQ ID NO: 652 - RNA, 25 nt, Artificial Sequence
  source: /note="Description of Artificial Sequence: Synthetic oligonucleotide"
gauggggaaggggaguggugaaaaa

SEQ ID NO: 653 - RNA, 25 nt, Artificial Sequence
  source: /note="Description of Artificial Sequence: Synthetic oligonucleotide"
auggggaaggggaguggugaaaaag

SEQ ID NO: 654 - RNA, 25 nt, Artificial Sequence
  source: /note="Description of Artificial Sequence: Synthetic oligonucleotide"
uggggaaggggaguggugaaaaagg

SEQ ID NO: 655 - RNA, 25 nt, Artificial Sequence
  source: /note="Description of Artificial Sequence: Synthetic oligonucleotide"
ggggaguggugaaaaaggggguguc

SEQ ID NO: 656 - RNA, 25 nt, Artificial Sequence
  source: /note="Description of Artificial Sequence: Synthetic oligonucleotide"
gaguggugaaaaagggggugucagg

SEQ ID NO: 657 - RNA, 25 nt, Artificial Sequence
  source: /note="Description of Artificial Sequence: Synthetic oligonucleotide"
aguggugaaaaagggggugucaggu

SEQ ID NO: 658 - RNA, 25 nt, Artificial Sequence
  source: /note="Description of Artificial Sequence: Synthetic oligonucleotide"
aaaaagggggugucaggugggagug

SEQ ID NO: 659 - RNA, 25 nt, Artificial Sequence
  source: /note="Description of Artificial Sequence: Synthetic oligonucleotide"
aaaagggggugucaggugggaguga

SEQ ID NO: 660 - RNA, 25 nt, Artificial Sequence
  source: /note="Description of Artificial Sequence: Synthetic oligonucleotide"
agggggugucaggugggagugaggg

SEQ ID NO: 661 - RNA, 25 nt, Artificial Sequence
  source: /note="Description of Artificial Sequence: Synthetic oligonucleotide"
gggggugucaggugggagugaggga

SEQ ID NO: 662 - RNA, 25 nt, Artificial Sequence
  source: /note="Description of Artificial Sequence: Synthetic oligonucleotide"
ggggugucaggugggagugagggag

SEQ ID NO: 663 - RNA, 25 nt, Artificial Sequence
  source: /note="Description of Artificial Sequence: Synthetic oligonucleotide"
gugccauuuuuucauguguuucucc

SEQ ID NO: 664 - RNA, 25 nt, Artificial Sequence
  source: /note="Description of Artificial Sequence: Synthetic oligonucleotide"
ugccauuuuuucauguguuucucca

SEQ ID NO: 665 - RNA, 25 nt, Artificial Sequence
  source: /note="Description of Artificial Sequence: Synthetic oligonucleotide"
ucuccaggguacuguacacgcuaaa

SEQ ID NO: 666 - RNA, 25 nt, Artificial Sequence
  source: /note="Description of Artificial Sequence: Synthetic oligonucleotide"
acauuuguaaacguccuuccccacc

SEQ ID NO: 667 - RNA, 25 nt, Artificial Sequence
  source: /note="Description of Artificial Sequence: Synthetic oligonucleotide"
accuggccaugcguuuucaugugcc

SEQ ID NO: 668 - RNA, 25 nt, Artificial Sequence
  source: /note="Description of Artificial Sequence: Synthetic oligonucleotide"
caugugccuggugagcuugcuacuc

SEQ ID NO: 669 - RNA, 25 nt, Artificial Sequence
  source: /note="Description of Artificial Sequence: Synthetic oligonucleotide"
augugccuggugagcuugcuacucu

SEQ ID NO: 670 - RNA, 25 nt, Artificial Sequence
  source: /note="Description of Artificial Sequence: Synthetic oligonucleotide"
cuggugagcuugcuacucugggcac

SEQ ID NO: 671 - RNA, 25 nt, Artificial Sequence
  source: /note="Description of Artificial Sequence: Synthetic oligonucleotide"
cauaguugcacagcucgcauuuaua

SEQ ID NO: 672 - RNA, 25 nt, Artificial Sequence
  source: /note="Description of Artificial Sequence: Synthetic oligonucleotide"
gcauuuauaaggccuuucgcccgug

SEQ ID NO: 673 - RNA, 25 nt, Artificial Sequence
  source: /note="Description of Artificial Sequence: Synthetic oligonucleotide"
ccuuucgcccguguggcuucuccug

SEQ ID NO: 674 - RNA, 25 nt, Artificial Sequence
  source: /note="Description of Artificial Sequence: Synthetic oligonucleotide"
ucgcugcgucugcccucuuuugagc

SEQ ID NO: 675 - RNA, 25 nt, Artificial Sequence
  source: /note="Description of Artificial Sequence: Synthetic oligonucleotide"
cgcugcgucugcccucuuuugagcu

SEQ ID NO: 676 - RNA, 25 nt, Artificial Sequence
  source: /note="Description of Artificial Sequence: Synthetic oligonucleotide"
ugcccucuuuugagcugggccugcc

SEQ ID NO: 677 - RNA, 25 nt, Artificial Sequence
  source: /note="Description of Artificial Sequence: Synthetic oligonucleotide"
gcccucuuuugagcugggccugccc

SEQ ID NO: 678 - RNA, 25 nt, Artificial Sequence
  source: /note="Description of Artificial Sequence: Synthetic oligonucleotide"
cuuuugagcugggccugcccgggcc

SEQ ID NO: 679 - RNA, 25 nt, Artificial Sequence
  source: /note="Description of Artificial Sequence: Synthetic oligonucleotide"
ccugcccgggcccggaccacuaaua

SEQ ID NO: 680 - RNA, 25 nt, Artificial Sequence
  source: /note="Description of Artificial Sequence: Synthetic oligonucleotide"
cugcccgggcccggaccacuaauau

SEQ ID NO: 681 - RNA, 25 nt, Artificial Sequence
  source: /note="Description of Artificial Sequence: Synthetic oligonucleotide"
ugcccgggcccggaccacuaauaug

SEQ ID NO: 682 - RNA, 25 nt, Artificial Sequence
  source: /note="Description of Artificial Sequence: Synthetic oligonucleotide"
cccgagaucccuccguccagcuccc

SEQ ID NO: 683 - RNA, 25 nt, Artificial Sequence
  source: /note="Description of Artificial Sequence: Synthetic oligonucleotide"
ccgagaucccuccguccagcucccc

SEQ ID NO: 684 - RNA, 25 nt, Artificial Sequence
  source: /note="Description of Artificial Sequence: Synthetic oligonucleotide"
agaucccuccguccagcuccccggg

SEQ ID NO: 685 - RNA, 25 nt, Artificial Sequence
  source: /note="Description of Artificial Sequence: Synthetic oligonucleotide"
ccuccguccagcuccccgggcggug

SEQ ID NO: 686 - RNA, 25 nt, Artificial Sequence
  source: /note="Description of Artificial Sequence: Synthetic oligonucleotide"
gagaagcgcaaacucccguucuccg

SEQ ID NO: 687 - RNA, 25 nt, Artificial Sequence
  source: /note="Description of Artificial Sequence: Synthetic oligonucleotide"
ccguucuccgaggagugcuccgacg

SEQ ID NO: 688 - RNA, 25 nt, Artificial Sequence
  source: /note="Description of Artificial Sequence: Synthetic oligonucleotide"
uucuccgaggagugcuccgacgagg

SEQ ID NO: 689 - RNA, 25 nt, Artificial Sequence
  source: /note="Description of Artificial Sequence: Synthetic oligonucleotide"
aggagugcuccgacgaggaggcaaa

SEQ ID NO: 690 - RNA, 25 nt, Artificial Sequence
  source: /note="Description of Artificial Sequence: Synthetic oligonucleotide"
gacgaggaggcaaaaggcgauuguc

SEQ ID NO: 691 - RNA, 25 nt, Artificial Sequence
  source: /note="Description of Artificial Sequence: Synthetic oligonucleotide"
cgauugucuggagucuccgaagcua

SEQ ID NO: 692 - RNA, 25 nt, Artificial Sequence
  source: /note="Description of Artificial Sequence: Synthetic oligonucleotide"
ugucuggagucuccgaagcuaagga

SEQ ID NO: 693 - RNA, 25 nt, Artificial Sequence
  source: /note="Description of Artificial Sequence: Synthetic oligonucleotide"
gucuggagucuccgaagcuaaggaa

SEQ ID NO: 694 - RNA, 25 nt, Artificial Sequence
  source: /note="Description of Artificial Sequence: Synthetic oligonucleotide"
cuaaggaagggaucuuugagcugcc

SEQ ID NO: 695 - RNA, 25 nt, Artificial Sequence
  source: /note="Description of Artificial Sequence: Synthetic oligonucleotide"
aggaagggaucuuugagcugccugg

SEQ ID NO: 696 - RNA, 25 nt, Artificial Sequence
  source: /note="Description of Artificial Sequence: Synthetic oligonucleotide"
uugagcugccuggaggccgcguagc

SEQ ID NO: 697 - RNA, 25 nt, Artificial Sequence
  source: /note="Description of Artificial Sequence: Synthetic oligonucleotide"
cacugcgaguacacguucuccgugu

SEQ ID NO: 698 - RNA, 25 nt, Artificial Sequence
  source: /note="Description of Artificial Sequence: Synthetic oligonucleotide"
acugcgaguacacguucuccguguu

SEQ ID NO: 699 - RNA, 25 nt, Artificial Sequence
  source: /note="Description of Artificial Sequence: Synthetic oligonucleotide"
uacacguucuccguguugggcaucg

SEQ ID NO: 700 - RNA, 25 nt, Artificial Sequence
  source: /note="Description of Artificial Sequence: Synthetic oligonucleotide"
cguucuccguguugggcaucgcggc

SEQ ID NO: 701 - RNA, 25 nt, Artificial Sequence
  source: /note="Description of Artificial Sequence: Synthetic oligonucleotide"
guucuccguguugggcaucgcggcc

SEQ ID NO: 702 - RNA, 25 nt, Artificial Sequence
  source: /note="Description of Artificial Sequence: Synthetic oligonucleotide"
uucuccguguugggcaucgcggccg

SEQ ID NO: 703 - RNA, 25 nt, Artificial Sequence
  source: /note="Description of Artificial Sequence: Synthetic oligonucleotide"
ucuccguguugggcaucgcggccgg

SEQ ID NO: 704 - RNA, 25 nt, Artificial Sequence
  source: /note="Description of Artificial Sequence: Synthetic oligonucleotide"
cguguugggcaucgcggccgggggc

SEQ ID NO: 705 - RNA, 25 nt, Artificial Sequence
  source: /note="Description of Artificial Sequence: Synthetic oligonucleotide"
uucucgagcuugaugcgcuuagaga

SEQ ID NO: 706 - RNA, 25 nt, Artificial Sequence
  source: /note="Description of Artificial Sequence: Synthetic oligonucleotide"
ucucgagcuugaugcgcuuagagaa

SEQ ID NO: 707 - RNA, 25 nt, Artificial Sequence
  source: /note="Description of Artificial Sequence: Synthetic oligonucleotide"
cucgagcuugaugcgcuuagagaag

SEQ ID NO: 708 - RNA, 25 nt, Artificial Sequence
  source: /note="Description of Artificial Sequence: Synthetic oligonucleotide"
cgcuuagagaaggggcucagcgagc

SEQ ID NO: 709 - RNA, 25 nt, Artificial Sequence
  source: /note="Description of Artificial Sequence: Synthetic oligonucleotide"
gcuuagagaaggggcucagcgagcu

SEQ ID NO: 710 - RNA, 25 nt, Artificial Sequence
  source: /note="Description of Artificial Sequence: Synthetic oligonucleotide"
cuuagagaaggggcucagcgagcug

SEQ ID NO: 711 - RNA, 25 nt, Artificial Sequence
  source: /note="Description of Artificial Sequence: Synthetic oligonucleotide"
cuggggcugcccagcagcagcuuuu

SEQ ID NO: 712 - RNA, 25 nt, Artificial Sequence
  source: /note="Description of Artificial Sequence: Synthetic oligonucleotide"
gcugcccagcagcagcuuuuuggac

SEQ ID NO: 713 - RNA, 25 nt, Artificial Sequence
  source: /note="Description of Artificial Sequence: Synthetic oligonucleotide"
agcagcuuuuuggacaggccccccg

SEQ ID NO: 714 - RNA, 25 nt, Artificial Sequence
  source: /note="Description of Artificial Sequence: Synthetic oligonucleotide"
acaggccccccgaggccgacucgcc

SEQ ID NO: 715 - RNA, 25 nt, Artificial Sequence
  source: /note="Description of Artificial Sequence: Synthetic oligonucleotide"
caggccccccgaggccgacucgccc

SEQ ID NO: 716 - RNA, 25 nt, Artificial Sequence
  source: /note="Description of Artificial Sequence: Synthetic oligonucleotide"
aggccccccgaggccgacucgcccg

SEQ ID NO: 717 - RNA, 25 nt, Artificial Sequence
  source: /note="Description of Artificial Sequence: Synthetic oligonucleotide"
ggccgacucgcccggggagcagccg

SEQ ID NO: 718 - RNA, 25 nt, Artificial Sequence
  source: /note="Description of Artificial Sequence: Synthetic oligonucleotide"
gccauuaacagugccaucgucuaug

SEQ ID NO: 719 - RNA, 25 nt, Artificial Sequence
  source: /note="Description of Artificial Sequence: Synthetic oligonucleotide"
ccaucgucuaugcgguccgacucgc

SEQ ID NO: 720 - RNA, 25 nt, Artificial Sequence
  source: /note="Description of Artificial Sequence: Synthetic oligonucleotide"
cgagucuucgucgcaagugucccug

SEQ ID NO: 721 - RNA, 25 nt, Artificial Sequence
  source: /note="Description of Artificial Sequence: Synthetic oligonucleotide"
ucgucgcaagugucccuguggcccu

SEQ ID NO: 722 - RNA, 25 nt, Artificial Sequence
  source: /note="Description of Artificial Sequence: Synthetic oligonucleotide"
caagugucccuguggcccucggccu

SEQ ID NO: 723 - RNA, 25 nt, Artificial Sequence
  source: /note="Description of Artificial Sequence: Synthetic oligonucleotide"
gucccuguggcccucggccucggcc

SEQ ID NO: 724 - RNA, 25 nt, Artificial Sequence
  source: /note="Description of Artificial Sequence: Synthetic oligonucleotide"
ccuguggcccucggccucggccagg

SEQ ID NO: 725 - RNA, 25 nt, Artificial Sequence
  source: /note="Description of Artificial Sequence: Synthetic oligonucleotide"
guggccgcgcuuaugcuucucgccc

SEQ ID NO: 726 - RNA, 25 nt, Artificial Sequence
  source: /note="Description of Artificial Sequence: Synthetic oligonucleotide"
gcgcuuaugcuucucgcccaggacc

SEQ ID NO: 727 - RNA, 25 nt, Artificial Sequence
  source: /note="Description of Artificial Sequence: Synthetic oligonucleotide"
cuuaugcuucucgcccaggaccugg

SEQ ID NO: 728 - RNA, 25 nt, Artificial Sequence
  source: /note="Description of Artificial Sequence: Synthetic oligonucleotide"
ugcuucucgcccaggaccuggugga

SEQ ID NO: 729 - RNA, 25 nt, Artificial Sequence
  source: /note="Description of Artificial Sequence: Synthetic oligonucleotide"
uggaaggccucgcugaagugcugca

SEQ ID NO: 730 - RNA, 25 nt, Artificial Sequence
  source: /note="Description of Artificial Sequence: Synthetic oligonucleotide"
cugagcaccaugcccugcaugacgu

SEQ ID NO: 731 - RNA, 25 nt, Artificial Sequence
  source: /note="Description of Artificial Sequence: Synthetic oligonucleotide"
ugagcaccaugcccugcaugacguc

SEQ ID NO: 732 - RNA, 25 nt, Artificial Sequence
  source: /note="Description of Artificial Sequence: Synthetic oligonucleotide"
caccaugcccugcaugacgucgggc

SEQ ID NO: 733 - RNA, 25 nt, Artificial Sequence
  source: /note="Description of Artificial Sequence: Synthetic oligonucleotide"
accaugcccugcaugacgucgggca

SEQ ID NO: 734 - RNA, 25 nt, Artificial Sequence
  source: /note="Description of Artificial Sequence: Synthetic oligonucleotide"
gcccugcaugacgucgggcagggcg

SEQ ID NO: 735 - RNA, 25 nt, Artificial Sequence
  source: /note="Description of Artificial Sequence: Synthetic oligonucleotide"
gaccgcgccccgcgagcuguucucg

SEQ ID NO: 736 - RNA, 25 nt, Artificial Sequence
  source: /note="Description of Artificial Sequence: Synthetic oligonucleotide"
cgcgccccgcgagcuguucucgugg

SEQ ID NO: 737 - RNA, 25 nt, Artificial Sequence
  source: /note="Description of Artificial Sequence: Synthetic oligonucleotide"
guucucgugguggcgcgccgccucc

SEQ ID NO: 738 - RNA, 25 nt, Artificial Sequence
  source: /note="Description of Artificial Sequence: Synthetic oligonucleotide"
ccucuuccuccucguccccguucuc

SEQ ID NO: 739 - RNA, 25 nt, Artificial Sequence
  source: /note="Description of Artificial Sequence: Synthetic oligonucleotide"
cucuuccuccucguccccguucucc

SEQ ID NO: 740 - RNA, 25 nt, Artificial Sequence
  source: /note="Description of Artificial Sequence: Synthetic oligonucleotide"
cuccucguccccguucuccgggauc

SEQ ID NO: 741 - RNA, 25 nt, Artificial Sequence
  source: /note="Description of Artificial Sequence: Synthetic oligonucleotide"
ucguccccguucuccgggaucaggu

SEQ ID NO: 742 - RNA, 25 nt, Artificial Sequence
  source: /note="Description of Artificial Sequence: Synthetic oligonucleotide"
cguccccguucuccgggaucagguu

SEQ ID NO: 743 - RNA, 25 nt, Artificial Sequence
  source: /note="Description of Artificial Sequence: Synthetic oligonucleotide"
guccccguucuccgggaucagguug

SEQ ID NO: 744 - RNA, 25 nt, Artificial Sequence
  source: /note="Description of Artificial Sequence: Synthetic oligonucleotide"
uuggggucguucucgcucuugaacu

SEQ ID NO: 745 - RNA, 25 nt, Artificial Sequence
  source: /note="Description of Artificial Sequence: Synthetic oligonucleotide"
uucucgcucuugaacuuggccacca

SEQ ID NO: 746 - RNA, 25 nt, Artificial Sequence
  source: /note="Description of Artificial Sequence: Synthetic oligonucleotide"
gccaccacggacuugagcgcgcugc

SEQ ID NO: 747 - RNA, 25 nt, Artificial Sequence
  source: /note="Description of Artificial Sequence: Synthetic oligonucleotide"
cugcuggcgcugcccaccaagucgc

SEQ ID NO: 748 - RNA, 25 nt, Artificial Sequence
  source: /note="Description of Artificial Sequence: Synthetic oligonucleotide"
gcgcugcccaccaagucgcuggugc

SEQ ID NO: 749 - RNA, 25 nt, Artificial Sequence
  source: /note="Description of Artificial Sequence: Synthetic oligonucleotide"
cgcugcccaccaagucgcuggugcc

SEQ ID NO: 750 - RNA, 25 nt, Artificial Sequence
  source: /note="Description of Artificial Sequence: Synthetic oligonucleotide"
ccaccaagucgcuggugccggguuc

SEQ ID NO: 751 - RNA, 25 nt, Artificial Sequence
  source: /note="Description of Artificial Sequence: Synthetic oligonucleotide"
caccaagucgcuggugccggguucc

SEQ ID NO: 752 - RNA, 25 nt, Artificial Sequence
  source: /note="Description of Artificial Sequence: Synthetic oligonucleotide"
accaagucgcuggugccggguuccg

SEQ ID NO: 753 - RNA, 25 nt, Artificial Sequence
  source: /note="Description of Artificial Sequence: Synthetic oligonucleotide"
ucgcuggugccggguuccggggagc

SEQ ID NO: 754 - RNA, 25 nt, Artificial Sequence
  source: /note="Description of Artificial Sequence: Synthetic oligonucleotide"
cuggugccggguuccggggagcugg

SEQ ID NO: 755 - RNA, 25 nt, Artificial Sequence
  source: /note="Description of Artificial Sequence: Synthetic oligonucleotide"
gugccggguuccggggagcuggcgg

SEQ ID NO: 756 - RNA, 25 nt, Artificial Sequence
  source: /note="Description of Artificial Sequence: Synthetic oligonucleotide"
gagcuggcgguggagagaccgucgu

SEQ ID NO: 757 - RNA, 25 nt, Artificial Sequence
  source: /note="Description of Artificial Sequence: Synthetic oligonucleotide"
agaccgucgucggacuugaccguca

SEQ ID NO: 758 - RNA, 25 nt, Artificial Sequence
  source: /note="Description of Artificial Sequence: Synthetic oligonucleotide"
gaccgucgucggacuugaccgucau

SEQ ID NO: 759 - RNA, 25 nt, Artificial Sequence
  source: /note="Description of Artificial Sequence: Synthetic oligonucleotide"
accgucgucggacuugaccgucaug

SEQ ID NO: 760 - RNA, 25 nt, Artificial Sequence
  source: /note="Description of Artificial Sequence: Synthetic oligonucleotide"
ccgucgucggacuugaccgucaugg

SEQ ID NO: 761 - RNA, 25 nt, Artificial Sequence
  source: /note="Description of Artificial Sequence: Synthetic oligonucleotide"
cgauuugugcaugugcgucuucaug

SEQ ID NO: 762 - RNA, 25 nt, Artificial Sequence
  source: /note="Description of Artificial Sequence: Synthetic oligonucleotide"
gucuucauguggcgcuucagcuugc

SEQ ID NO: 763 - RNA, 25 nt, Artificial Sequence
  source: /note="Description of Artificial Sequence: Synthetic oligonucleotide"
cauguggcgcuucagcuugcuggcc

SEQ ID NO: 764 - RNA, 25 nt, Artificial Sequence
  source: /note="Description of Artificial Sequence: Synthetic oligonucleotide"
auguggcgcuucagcuugcuggccu

SEQ ID NO: 765 - RNA, 25 nt, Artificial Sequence
  source: /note="Description of Artificial Sequence: Synthetic oligonucleotide"
cagcuugcuggccugggugcacgcg

SEQ ID NO: 766 - RNA, 25 nt, Artificial Sequence
  source: /note="Description of Artificial Sequence: Synthetic oligonucleotide"
ggccugggugcacgcguggucgcac

SEQ ID NO: 767 - RNA, 25 nt, Artificial Sequence
  source: /note="Description of Artificial Sequence: Synthetic oligonucleotide"
gcguggucgcacagguugcacuugu

SEQ ID NO: 768 - RNA, 25 nt, Artificial Sequence
  source: /note="Description of Artificial Sequence: Synthetic oligonucleotide"
cguggucgcacagguugcacuugua

SEQ ID NO: 769 - RNA, 25 nt, Artificial Sequence
  source: /note="Description of Artificial Sequence: Synthetic oligonucleotide"
gcacuuguagggcuucucgcccgug

SEQ ID NO: 770 - RNA, 25 nt, Artificial Sequence
  source: /note="Description of Artificial Sequence: Synthetic oligonucleotide"
gggcuucucgcccguguggcugcgc

SEQ ID NO: 771 - RNA, 25 nt, Artificial Sequence
  source: /note="Description of Artificial Sequence: Synthetic oligonucleotide"
cguguggcugcgccggugcaccacc

SEQ ID NO: 772 - RNA, 25 nt, Artificial Sequence
  source: /note="Description of Artificial Sequence: Synthetic oligonucleotide"
gucuugccgcagaacucgcaugacu

SEQ ID NO: 773 - RNA, 25 nt, Artificial Sequence
  source: /note="Description of Artificial Sequence: Synthetic oligonucleotide"
agaacucgcaugacuuggacuugac

SEQ ID NO: 774 - RNA, 25 nt, Artificial Sequence
  source: /note="Description of Artificial Sequence: Synthetic oligonucleotide"
gaacucgcaugacuuggacuugacc

SEQ ID NO: 775 - RNA, 25 nt, Artificial Sequence
  source: /note="Description of Artificial Sequence: Synthetic oligonucleotide"
aacucgcaugacuuggacuugaccg

SEQ ID NO: 776 - RNA, 25 nt, Artificial Sequence
  source: /note="Description of Artificial Sequence: Synthetic oligonucleotide"
acucgcaugacuuggacuugaccgg

SEQ ID NO: 777 - RNA, 25 nt, Artificial Sequence
  source: /note="Description of Artificial Sequence: Synthetic oligonucleotide"
gcaugacuuggacuugaccgggggc

SEQ ID NO: 778 - RNA, 25 nt, Artificial Sequence
  source: /note="Description of Artificial Sequence: Synthetic oligonucleotide"
caugacuuggacuugaccgggggcu

SEQ ID NO: 779 - RNA, 25 nt, Artificial Sequence
  source: /note="Description of Artificial Sequence: Synthetic oligonucleotide"
gacuuggacuugaccgggggcuggg

SEQ ID NO: 780 - RNA, 25 nt, Artificial Sequence
  source: /note="Description of Artificial Sequence: Synthetic oligonucleotide"
acuuggacuugaccgggggcuggga

SEQ ID NO: 781 - RNA, 25 nt, Artificial Sequence
  source: /note="Description of Artificial Sequence: Synthetic oligonucleotide"
uggacuugaccgggggcugggaggg

SEQ ID NO: 782 - RNA, 25 nt, Artificial Sequence
  source: /note="Description of Artificial Sequence: Synthetic oligonucleotide"
acuugaccgggggcugggagggagg

SEQ ID NO: 783 - RNA, 25 nt, Artificial Sequence
  source: /note="Description of Artificial Sequence: Synthetic oligonucleotide"
cuugaccgggggcugggagggagga

SEQ ID NO: 784 - RNA, 25 nt, Artificial Sequence
  source: /note="Description of Artificial Sequence: Synthetic oligonucleotide"
uugaccgggggcugggagggaggag

SEQ ID NO: 785 - RNA, 25 nt, Artificial Sequence
  source: /note="Description of Artificial Sequence: Synthetic oligonucleotide"
accgggggcugggagggaggagggg

SEQ ID NO: 786 - RNA, 25 nt, Artificial Sequence
  source: /note="Description of Artificial Sequence: Synthetic oligonucleotide"
gggagggaggaggggcggauugcag

SEQ ID NO: 787 - RNA, 25 nt, Artificial Sequence
  source: /note="Description of Artificial Sequence: Synthetic oligonucleotide"
agggaggaggggcggauugcagagg

SEQ ID NO: 788 - RNA, 25 nt, Artificial Sequence
  source: /note="Description of Artificial Sequence: Synthetic oligonucleotide"
gggaggaggggcggauugcagagga

SEQ ID NO: 789 - RNA, 25 nt, Artificial Sequence
  source: /note="Description of Artificial Sequence: Synthetic oligonucleotide"
aggaggggcggauugcagaggaggg

SEQ ID NO: 790 - RNA, 25 nt, Artificial Sequence
  source: /note="Description of Artificial Sequence: Synthetic oligonucleotide"
ggaggggcggauugcagaggaggga

SEQ ID NO: 791 - RNA, 25 nt, Artificial Sequence
  source: /note="Description of Artificial Sequence: Synthetic oligonucleotide"
gaggggcggauugcagaggagggag

SEQ ID NO: 792 - RNA, 25 nt, Artificial Sequence
  source: /note="Description of Artificial Sequence: Synthetic oligonucleotide"
aggggcggauugcagaggagggagg

SEQ ID NO: 793 - RNA, 25 nt, Artificial Sequence
  source: /note="Description of Artificial Sequence: Synthetic oligonucleotide"
ggggcggauugcagaggagggaggg

SEQ ID NO: 794 - RNA, 25 nt, Artificial Sequence
  source: /note="Description of Artificial Sequence: Synthetic oligonucleotide"
gggcggauugcagaggagggagggg

SEQ ID NO: 795 - RNA, 25 nt, Artificial Sequence
  source: /note="Description of Artificial Sequence: Synthetic oligonucleotide"
cagaggagggagggggggcgucgcc

SEQ ID NO: 796 - RNA, 25 nt, Artificial Sequence
  source: /note="Description of Artificial Sequence: Synthetic oligonucleotide"
ggagggagggggggcgucgccagga

SEQ ID NO: 797 - RNA, 25 nt, Artificial Sequence
  source: /note="Description of Artificial Sequence: Synthetic oligonucleotide"
gagggagggggggcgucgccaggaa

SEQ ID NO: 798 - RNA, 25 nt, Artificial Sequence
  source: /note="Description of Artificial Sequence: Synthetic oligonucleotide"
ggagggggggcgucgccaggaaggg

SEQ ID NO: 799 - RNA, 25 nt, Artificial Sequence
  source: /note="Description of Artificial Sequence: Synthetic oligonucleotide"
ucgccaggaagggcggcuugcuacc

SEQ ID NO: 800 - RNA, 25 nt, Artificial Sequence
  source: /note="Description of Artificial Sequence: Synthetic oligonucleotide"
caggaagggcggcuugcuaccuggc

SEQ ID NO: 801 - RNA, 25 nt, Artificial Sequence
  source: /note="Description of Artificial Sequence: Synthetic oligonucleotide"
agggcggcuugcuaccuggcuggaa

SEQ ID NO: 802 - RNA, 25 nt, Artificial Sequence
  source: /note="Description of Artificial Sequence: Synthetic oligonucleotide"
ggaaugguugcaguaaccuuugcau

SEQ ID NO: 803 - RNA, 25 nt, Artificial Sequence
  source: /note="Description of Artificial Sequence: Synthetic oligonucleotide"
gaaugguugcaguaaccuuugcaua

SEQ ID NO: 804 - RNA, 25 nt, Artificial Sequence
  source: /note="Description of Artificial Sequence: Synthetic oligonucleotide"
gguugcaguaaccuuugcauagggc

SEQ ID NO: 805 - RNA, 25 nt, Artificial Sequence
  source: /note="Description of Artificial Sequence: Synthetic oligonucleotide"
guugcaguaaccuuugcauagggcu

SEQ ID NO: 806 - RNA, 25 nt, Artificial Sequence
  source: /note="Description of Artificial Sequence: Synthetic oligonucleotide"
caguaaccuuugcauagggcugggc

SEQ ID NO: 807 - RNA, 25 nt, Artificial Sequence
  source: /note="Description of Artificial Sequence: Synthetic oligonucleotide"
accuuugcauagggcugggccggcc

SEQ ID NO: 808 - RNA, 25 nt, Artificial Sequence
  source: /note="Description of Artificial Sequence: Synthetic oligonucleotide"
ccuuugcauagggcugggccggccu

SEQ ID NO: 809 - RNA, 25 nt, Artificial Sequence
  source: /note="Description of Artificial Sequence: Synthetic oligonucleotide"
cuuugcauagggcugggccggccug

SEQ ID NO: 810 - RNA, 25 nt, Artificial Sequence
  source: /note="Description of Artificial Sequence: Synthetic oligonucleotide"
uagggcugggccggccuggggacag

SEQ ID NO: 811 - RNA, 25 nt, Artificial Sequence
  source: /note="Description of Artificial Sequence: Synthetic oligonucleotide"
ggcugggccggccuggggacagcgg

SEQ ID NO: 812 - RNA, 25 nt, Artificial Sequence
  source: /note="Description of Artificial Sequence: Synthetic oligonucleotide"
gcugggccggccuggggacagcggu

SEQ ID NO: 813 - RNA, 25 nt, Artificial Sequence
  source: /note="Description of Artificial Sequence: Synthetic oligonucleotide"
ucucuaagucuccuagagaaaucca

SEQ ID NO: 814 - RNA, 25 nt, Artificial Sequence
  source: /note="Description of Artificial Sequence: Synthetic oligonucleotide"
cuaagucuccuagagaaauccaugg

SEQ ID NO: 815 - RNA, 25 nt, Artificial Sequence
  source: /note="Description of Artificial Sequence: Synthetic oligonucleotide"
uaagucuccuagagaaauccauggc

SEQ ID NO: 816 - RNA, 25 nt, Artificial Sequence
  source: /note="Description of Artificial Sequence: Synthetic oligonucleotide"
gucuccuagagaaauccauggcggg

SEQ ID NO: 817 - RNA, 25 nt, Artificial Sequence
  source: /note="Description of Artificial Sequence: Synthetic oligonucleotide"
ccauggcgggaggcuccauagccau

SEQ ID NO: 818 - RNA, 25 nt, Artificial Sequence
  source: /note="Description of Artificial Sequence: Synthetic oligonucleotide"
ggauucaaccgcagcacccugucaa

SEQ ID NO: 819 - RNA, 25 nt, Artificial Sequence
  source: /note="Description of Artificial Sequence: Synthetic oligonucleotide"
accgcagcacccugucaaaggcacu

SEQ ID NO: 820 - RNA, 25 nt, Artificial Sequence
  source: /note="Description of Artificial Sequence: Synthetic oligonucleotide"
ccgcagcacccugucaaaggcacuc

SEQ ID NO: 821 - RNA, 25 nt, Artificial Sequence
  source: /note="Description of Artificial Sequence: Synthetic oligonucleotide"
cacccugucaaaggcacucggguga

SEQ ID NO: 822 - RNA, 25 nt, Artificial Sequence
  source: /note="Description of Artificial Sequence: Synthetic oligonucleotide"
acccugucaaaggcacucgggugau

SEQ ID NO: 823 - RNA, 25 nt, Artificial Sequence
  source: /note="Description of Artificial Sequence: Synthetic oligonucleotide"
cugucaaaggcacucgggugauggg

SEQ ID NO: 824 - RNA, 25 nt, Artificial Sequence
  source: /note="Description of Artificial Sequence: Synthetic oligonucleotide"
aaaggcacucgggugauggguggcc

SEQ ID NO: 825 - RNA, 25 nt, Artificial Sequence
  source: /note="Description of Artificial Sequence: Synthetic oligonucleotide"
aaggcacucgggugauggguggcca

SEQ ID NO: 826 - RNA, 25 nt, Artificial Sequence
  source: /note="Description of Artificial Sequence: Synthetic oligonucleotide"
ggccagggccaucucuuccgccccc

SEQ ID NO: 827 - RNA, 25 nt, Artificial Sequence
  source: /note="Description of Artificial Sequence: Synthetic oligonucleotide"
cucuuccgcccccaggcgcucuaug

SEQ ID NO: 828 - RNA, 25 nt, Artificial Sequence
  source: /note="Description of Artificial Sequence: Synthetic oligonucleotide"
uuccgcccccaggcgcucuaugcgg

SEQ ID NO: 829 - RNA, 25 nt, Artificial Sequence
  source: /note="Description of Artificial Sequence: Synthetic oligonucleotide"
uccgcccccaggcgcucuaugcggu

SEQ ID NO: 830 - RNA, 25 nt, Artificial Sequence
  source: /note="Description of Artificial Sequence: Synthetic oligonucleotide"
ccgcccccaggcgcucuaugcggug

SEQ ID NO: 831 - RNA, 25 nt, Artificial Sequence
  source: /note="Description of Artificial Sequence: Synthetic oligonucleotide"
cgcccccaggcgcucuaugcggugg

SEQ ID NO: 832 - RNA, 25 nt, Artificial Sequence
  source: /note="Description of Artificial Sequence: Synthetic oligonucleotide"
ugcgguggggguccaagugaugucu

SEQ ID NO: 833 - RNA, 25 nt, Artificial Sequence
  source: /note="Description of Artificial Sequence: Synthetic oligonucleotide"
gguggggguccaagugaugucucgg

SEQ ID NO: 834 - RNA, 25 nt, Artificial Sequence
  source: /note="Description of Artificial Sequence: Synthetic oligonucleotide"
ggggguccaagugaugucucggugg

SEQ ID NO: 835 - RNA, 25 nt, Artificial Sequence
  source: /note="Description of Artificial Sequence: Synthetic oligonucleotide"
gugaugucucggugguggacuaaac

SEQ ID NO: 836 - RNA, 25 nt, Artificial Sequence
  source: /note="Description of Artificial Sequence: Synthetic oligonucleotide"
ugaugucucggugguggacuaaaca

SEQ ID NO: 837 - RNA, 25 nt, Artificial Sequence
  source: /note="Description of Artificial Sequence: Synthetic oligonucleotide"
gaugucucggugguggacuaaacag

SEQ ID NO: 838 - RNA, 25 nt, Artificial Sequence
  source: /note="Description of Artificial Sequence: Synthetic oligonucleotide"
augucucggugguggacuaaacagg

SEQ ID NO: 839 - RNA, 25 nt, Artificial Sequence
  source: /note="Description of Artificial Sequence: Synthetic oligonucleotide"
ugucucggugguggacuaaacaggg

SEQ ID NO: 840 - RNA, 25 nt, Artificial Sequence
  source: /note="Description of Artificial Sequence: Synthetic oligonucleotide"
gucucggugguggacuaaacagggg

SEQ ID NO: 841 - RNA, 25 nt, Artificial Sequence
  source: /note="Description of Artificial Sequence: Synthetic oligonucleotide"
ggugguggacuaaacagggggggag

SEQ ID NO: 842 - RNA, 25 nt, Artificial Sequence
  source: /note="Description of Artificial Sequence: Synthetic oligonucleotide"
gugguggacuaaacagggggggagu

SEQ ID NO: 843 - RNA, 25 nt, Artificial Sequence
  source: /note="Description of Artificial Sequence: Synthetic oligonucleotide"
guggacuaaacagggggggaguggg

SEQ ID NO: 844 - RNA, 25 nt, Artificial Sequence
  source: /note="Description of Artificial Sequence: Synthetic oligonucleotide"
aguggguggaaagcgcccuucugcc

SEQ ID NO: 845 - RNA, 25 nt, Artificial Sequence
  source: /note="Description of Artificial Sequence: Synthetic oligonucleotide"
gguggaaagcgcccuucugccaggc

SEQ ID NO: 846 - RNA, 25 nt, Artificial Sequence
  source: /note="Description of Artificial Sequence: Synthetic oligonucleotide"
cggaagccucucucgauacugaucc

SEQ ID NO: 847 - RNA, 25 nt, Artificial Sequence
  source: /note="Description of Artificial Sequence: Synthetic oligonucleotide"
cgauacugauccugguauucuuagc

SEQ ID NO: 848 - RNA, 25 nt, Artificial Sequence
  source: /note="Description of Artificial Sequence: Synthetic oligonucleotide"
gauccugguauucuuagcagguuaa

SEQ ID NO: 849 - RNA, 25 nt, Artificial Sequence
  source: /note="Description of Artificial Sequence: Synthetic oligonucleotide"
auccugguauucuuagcagguuaaa

SEQ ID NO: 850 - RNA, 25 nt, Artificial Sequence
  source: /note="Description of Artificial Sequence: Synthetic oligonucleotide"
uccugguauucuuagcagguuaaag

SEQ ID NO: 851 - RNA, 25 nt, Artificial Sequence
  source: /note="Description of Artificial Sequence: Synthetic oligonucleotide"
guuauugucugcaauaugaauccca

SEQ ID NO: 852 - RNA, 25 nt, Artificial Sequence
  source: /note="Description of Artificial Sequence: Synthetic oligonucleotide"
ugucugcaauaugaaucccauggag

SEQ ID NO: 853 - RNA, 25 nt, Artificial Sequence
  source: /note="Description of Artificial Sequence: Synthetic oligonucleotide"
cugcaauaugaaucccauggagagg

SEQ ID NO: 854 - RNA, 25 nt, Artificial Sequence
  source: /note="Description of Artificial Sequence: Synthetic oligonucleotide"
aauaugaaucccauggagagguggc

SEQ ID NO: 855 - RNA, 25 nt, Artificial Sequence
  source: /note="Description of Artificial Sequence: Synthetic oligonucleotide"
auaugaaucccauggagagguggcu

SEQ ID NO: 856 - RNA, 25 nt, Artificial Sequence
  source: /note="Description of Artificial Sequence: Synthetic oligonucleotide"
gaaucccauggagagguggcuggga

SEQ ID NO: 857 - RNA, 25 nt, Artificial Sequence
  source: /note="Description of Artificial Sequence: Synthetic oligonucleotide"
aaggacauucugcaccuaguccuga

SEQ ID NO: 858 - RNA, 25 nt, Artificial Sequence
  source: /note="Description of Artificial Sequence: Synthetic oligonucleotide"
aggacauucugcaccuaguccugaa

SEQ ID NO: 859 - RNA, 25 nt, Artificial Sequence
  source: /note="Description of Artificial Sequence: Synthetic oligonucleotide"
cuaguccugaagggauaccaacccg

SEQ ID NO: 860 - RNA, 25 nt, Artificial Sequence
  source: /note="Description of Artificial Sequence: Synthetic oligonucleotide"
uaguccugaagggauaccaacccgc

SEQ ID NO: 861 - RNA, 25 nt, Artificial Sequence
  source: /note="Description of Artificial Sequence: Synthetic oligonucleotide"
aguccugaagggauaccaacccgcg

SEQ ID NO: 862 - RNA, 25 nt, Artificial Sequence
  source: /note="Description of Artificial Sequence: Synthetic oligonucleotide"
ugaagggauaccaacccgcgggguc

SEQ ID NO: 863 - RNA, 25 nt, Artificial Sequence
  source: /note="Description of Artificial Sequence: Synthetic oligonucleotide"
gaagggauaccaacccgcgggguca

SEQ ID NO: 864 - RNA, 25 nt, Artificial Sequence
  source: /note="Description of Artificial Sequence: Synthetic oligonucleotide"
aagggauaccaacccgcggggucag

SEQ ID NO: 865 - RNA, 25 nt, Artificial Sequence
  source: /note="Description of Artificial Sequence: Synthetic oligonucleotide"
gcguguugcaagagaaaccaugcac

SEQ ID NO: 866 - RNA, 25 nt, Artificial Sequence
  source: /note="Description of Artificial Sequence: Synthetic oligonucleotide"
gcaagagaaaccaugcacuggugaa

SEQ ID NO: 867 - RNA, 25 nt, Artificial Sequence
  source: /note="Description of Artificial Sequence: Synthetic oligonucleotide"
uugcaaguuguacauguguagcugc

SEQ ID NO: 868 - RNA, 25 nt, Artificial Sequence
  source: /note="Description of Artificial Sequence: Synthetic oligonucleotide"
ugcaaguuguacauguguagcugcu

SEQ ID NO: 869 - RNA, 25 nt, Artificial Sequence
  source: /note="Description of Artificial Sequence: Synthetic oligonucleotide"
ggaaaaaccacugucuguguuuuuu

SEQ ID NO: 870 - RNA, 25 nt, Artificial Sequence
  source: /note="Description of Artificial Sequence: Synthetic oligonucleotide"
guuucuggucuuuguuaaguucuau

SEQ ID NO: 871 - RNA, 25 nt, Artificial Sequence
  source: /note="Description of Artificial Sequence: Synthetic oligonucleotide"
ccuggcuuuuuauuguauuuguuuc

SEQ ID NO: 872 - RNA, 25 nt, Artificial Sequence
  source: /note="Description of Artificial Sequence: Synthetic oligonucleotide"
aagaugaccaaaggucauuacaacc

SEQ ID NO: 873 - RNA, 25 nt, Artificial Sequence
  source: /note="Description of Artificial Sequence: Synthetic oligonucleotide"
aaaaaaaaaaauaaaagaugaccaa

SEQ ID NO: 874 - RNA, 25 nt, Artificial Sequence
  source: /note="Description of Artificial Sequence: Synthetic oligonucleotide"
ugcuuaugugcccuguucaaaacag

SEQ ID NO: 875 - RNA, 25 nt, Artificial Sequence
  source: /note="Description of Artificial Sequence: Synthetic oligonucleotide"
aacuugaaauuuuaucuuuuacuau

SEQ ID NO: 876 - RNA, 25 nt, Artificial Sequence
  source: /note="Description of Artificial Sequence: Synthetic oligonucleotide"
uaacuugaaauuuuaucuuuuacua

SEQ ID NO: 877 - RNA, 25 nt, Artificial Sequence
  source: /note="Description of Artificial Sequence: Synthetic oligonucleotide"
auggcaaugcagaauauuuuguuau

SEQ ID NO: 878 - RNA, 25 nt, Artificial Sequence
  source: /note="Description of Artificial Sequence: Synthetic oligonucleotide"
gcuuuagucaauacuuuuuuguaaa

SEQ ID NO: 879 - RNA, 25 nt, Artificial Sequence
  source: /note="Description of Artificial Sequence: Synthetic oligonucleotide"
acuaaauggugcuuuauauuuagau

SEQ ID NO: 880 - RNA, 25 nt, Artificial Sequence
  source: /note="Description of Artificial Sequence: Synthetic oligonucleotide"
guuuuuuucauugccaaaaacuaaa

SEQ ID NO: 881 - RNA, 25 nt, Artificial Sequence
  source: /note="Description of Artificial Sequence: Synthetic oligonucleotide"
augcaguacugcaagcuaauaacgu

SEQ ID NO: 882 - RNA, 25 nt, Artificial Sequence
  source: /note="Description of Artificial Sequence: Synthetic oligonucleotide"
aaugucacauggauggcugucauag

SEQ ID NO: 883 - RNA, 25 nt, Artificial Sequence
  source: /note="Description of Artificial Sequence: Synthetic oligonucleotide"
gaaugucacauggauggcugucaua

SEQ ID NO: 884 - RNA, 25 nt, Artificial Sequence
  source: /note="Description of Artificial Sequence: Synthetic oligonucleotide"
agaaugucacauggauggcugucau

SEQ ID NO: 885 - RNA, 25 nt, Artificial Sequence
  source: /note="Description of Artificial Sequence: Synthetic oligonucleotide"
ggagccugcuagaaugucacaugga

SEQ ID NO: 886 - RNA, 25 nt, Artificial Sequence
  source: /note="Description of Artificial Sequence: Synthetic oligonucleotide"
ugggggagccugcuagaaugucaca

SEQ ID NO: 887 - RNA, 25 nt, Artificial Sequence
  source: /note="Description of Artificial Sequence: Synthetic oligonucleotide"
gagaagccauauaauggcgguuugg

SEQ ID NO: 888 - RNA, 25 nt, Artificial Sequence
  source: /note="Description of Artificial Sequence: Synthetic oligonucleotide"
ugagaagccauauaauggcgguuug

SEQ ID NO: 889 - RNA, 25 nt, Artificial Sequence
  source: /note="Description of Artificial Sequence: Synthetic oligonucleotide"
augagaagccauauaauggcgguuu

SEQ ID NO: 890 - RNA, 25 nt, Artificial Sequence
  source: /note="Description of Artificial Sequence: Synthetic oligonucleotide"
gaugagaagccauauaauggcgguu

SEQ ID NO: 891 - RNA, 25 nt, Artificial Sequence
  source: /note="Description of Artificial Sequence: Synthetic oligonucleotide"
uuacagaugagaagccauauaaugg

SEQ ID NO: 892 - RNA, 25 nt, Artificial Sequence
  source: /note="Description of Artificial Sequence: Synthetic oligonucleotide"
acauuacagaugagaagccauauaa

SEQ ID NO: 893 - RNA, 25 nt, Artificial Sequence
  source: /note="Description of Artificial Sequence: Synthetic oligonucleotide"
ccacaguauauuuuuuuaauuuggc

SEQ ID NO: 894 - RNA, 25 nt, Artificial Sequence
  source: /note="Description of Artificial Sequence: Synthetic oligonucleotide"
gcugccacaguauauuuuuuuaauu

SEQ ID NO: 895 - RNA, 25 nt, Artificial Sequence
  source: /note="Description of Artificial Sequence: Synthetic oligonucleotide"
uuuugguaguggaaaaaaaaaagac

SEQ ID NO: 896 - RNA, 25 nt, Artificial Sequence
  source: /note="Description of Artificial Sequence: Synthetic oligonucleotide"
gguaucaauguaccuuuuuugguag

SEQ ID NO: 897 - RNA, 25 nt, Artificial Sequence
  source: /note="Description of Artificial Sequence: Synthetic oligonucleotide"
uuaaaagguaucaauguaccuuuuu

SEQ ID NO: 898 - RNA, 25 nt, Artificial Sequence
  source: /note="Description of Artificial Sequence: Synthetic oligonucleotide"
uuuaacuguugcuuguucucuuaaa

SEQ ID NO: 899 - RNA, 25 nt, Artificial Sequence
  source: /note="Description of Artificial Sequence: Synthetic oligonucleotide"
uugaauuaaauguucaucuaguguu

SEQ ID NO: 900 - RNA, 25 nt, Artificial Sequence
  source: /note="Description of Artificial Sequence: Synthetic oligonucleotide"
uggucuuuuuucuguauuucuagaa

SEQ ID NO: 901 - RNA, 25 nt, Artificial Sequence
  source: /note="Description of Artificial Sequence: Synthetic oligonucleotide"
ugauuccuaugcuaaaauacauuua

SEQ ID NO: 902 - RNA, 25 nt, Artificial Sequence
  source: /note="Description of Artificial Sequence: Synthetic oligonucleotide"
uuaagauuauauaguacuuaaauau

SEQ ID NO: 903 - RNA, 25 nt, Artificial Sequence
  source: /note="Description of Artificial Sequence: Synthetic oligonucleotide"
aaaaaaaaaaacauacauuggggaa

SEQ ID NO: 904 - RNA, 25 nt, Artificial Sequence
  source: /note="Description of Artificial Sequence: Synthetic oligonucleotide"
uuguaaaaaaaaaaaacauacauug

SEQ ID NO: 905 - RNA, 25 nt, Artificial Sequence
  source: /note="Description of Artificial Sequence: Synthetic oligonucleotide"
guuguaaaaaaaaaaaacauacauu

SEQ ID NO: 906 - RNA, 25 nt, Artificial Sequence
  source: /note="Description of Artificial Sequence: Synthetic oligonucleotide"
gguuguaaaaaaaaaaaacauacau

SEQ ID NO: 907 - RNA, 25 nt, Artificial Sequence
  source: /note="Description of Artificial Sequence: Synthetic oligonucleotide"
augccuuggauacacaccgcucuuc

SEQ ID NO: 908 - RNA, 25 nt, Artificial Sequence
  source: /note="Description of Artificial Sequence: Synthetic oligonucleotide"
aaaugguaguggaaauucuaugccu

SEQ ID NO: 909 - RNA, 25 nt, Artificial Sequence
  source: /note="Description of Artificial Sequence: Synthetic oligonucleotide"
cuuguuauccauuuaaaaaugguag

SEQ ID NO: 910 - RNA, 25 nt, Artificial Sequence
  source: /note="Description of Artificial Sequence: Synthetic oligonucleotide"
acaagacuuguuauccauuuaaaaa

SEQ ID NO: 911 - RNA, 25 nt, Artificial Sequence
  source: /note="Description of Artificial Sequence: Synthetic oligonucleotide"
gcauuuuaggguuccauugucuugg

SEQ ID NO: 912 - RNA, 25 nt, Artificial Sequence
  source: /note="Description of Artificial Sequence: Synthetic oligonucleotide"
acugcauuuuaggguuccauugucu

SEQ ID NO: 913 - RNA, 25 nt, Artificial Sequence
  source: /note="Description of Artificial Sequence: Synthetic oligonucleotide"
auguuuaggggggaacugcauuuua

SEQ ID NO: 914 - RNA, 25 nt, Artificial Sequence
  source: /note="Description of Artificial Sequence: Synthetic oligonucleotide"
uauguuuaggggggaacugcauuuu

SEQ ID NO: 915 - RNA, 25 nt, Artificial Sequence
  source: /note="Description of Artificial Sequence: Synthetic oligonucleotide"
aaaaaacacuucauuauguuuaggg

SEQ ID NO: 916 - RNA, 25 nt, Artificial Sequence
  source: /note="Description of Artificial Sequence: Synthetic oligonucleotide"
uaaaaaacacuucauuauguuuagg

SEQ ID NO: 917 - RNA, 25 nt, Artificial Sequence
  source: /note="Description of Artificial Sequence: Synthetic oligonucleotide"
uuaaaaaacacuucauuauguuuag

SEQ ID NO: 918 - RNA, 25 nt, Artificial Sequence
  source: /note="Description of Artificial Sequence: Synthetic oligonucleotide"
uuuaaaaaacacuucauuauguuua

SEQ ID NO: 919 - RNA, 25 nt, Artificial Sequence
  source: /note="Description of Artificial Sequence: Synthetic oligonucleotide"
uuuuaaaaaacacuucauuauguuu

SEQ ID NO: 920 - RNA, 25 nt, Artificial Sequence
  source: /note="Description of Artificial Sequence: Synthetic oligonucleotide"
ugauugcuuucgcuucuacagugca

SEQ ID NO: 921 - RNA, 25 nt, Artificial Sequence
  source: /note="Description of Artificial Sequence: Synthetic oligonucleotide"
gacgcaacauugcaagcgcugugaa

SEQ ID NO: 922 - RNA, 25 nt, Artificial Sequence
  source: /note="Description of Artificial Sequence: Synthetic oligonucleotide"
uacuugacuauugagcuuacuuacu

SEQ ID NO: 923 - RNA, 25 nt, Artificial Sequence
  source: /note="Description of Artificial Sequence: Synthetic oligonucleotide"
aaaaaaauugaacacaaucucauug

SEQ ID NO: 924 - RNA, 25 nt, Artificial Sequence
  source: /note="Description of Artificial Sequence: Synthetic oligonucleotide"
ucccaguuuacaggucuauacuuaa

SEQ ID NO: 925 - RNA, 25 nt, Artificial Sequence
  source: /note="Description of Artificial Sequence: Synthetic oligonucleotide"
uucccaguuuacaggucuauacuua

SEQ ID NO: 926 - RNA, 25 nt, Artificial Sequence
  source: /note="Description of Artificial Sequence: Synthetic oligonucleotide"
gcacuguacaauuuucccaguuuac

SEQ ID NO: 927 - RNA, 25 nt, Artificial Sequence
  source: /note="Description of Artificial Sequence: Synthetic oligonucleotide"
gaguauaaaauaaaccugcucagau

SEQ ID NO: 928 - RNA, 25 nt, Artificial Sequence
  source: /note="Description of Artificial Sequence: Synthetic oligonucleotide"
aucuuuucucuaaucagagauacag

SEQ ID NO: 929 - RNA, 25 nt, Artificial Sequence
  source: /note="Description of Artificial Sequence: Synthetic oligonucleotide"
aauaaaagcuagcaucugccccagu

SEQ ID NO: 930 - RNA, 25 nt, Artificial Sequence
  source: /note="Description of Artificial Sequence: Synthetic oligonucleotide"
ugugcuauuuguguuaacauggaag

SEQ ID NO: 931 - RNA, 25 nt, Artificial Sequence
  source: /note="Description of Artificial Sequence: Synthetic oligonucleotide"
acacugugugcuauuuguguuaaca

SEQ ID NO: 932 - RNA, 25 nt, Artificial Sequence
  source: /note="Description of Artificial Sequence: Synthetic oligonucleotide"
acuauuugccauuuaaaacuagaac

SEQ ID NO: 933 - RNA, 25 nt, Artificial Sequence
  source: /note="Description of Artificial Sequence: Synthetic oligonucleotide"
aauaauaugauuuauuagcacaacg

SEQ ID NO: 934 - RNA, 25 nt, Artificial Sequence
  source: /note="Description of Artificial Sequence: Synthetic oligonucleotide"
aggcugacaauaagguuugacagag

SEQ ID NO: 935 - RNA, 25 nt, Artificial Sequence
  source: /note="Description of Artificial Sequence: Synthetic oligonucleotide"
gaggcugacaauaagguuugacaga

SEQ ID NO: 936 - RNA, 25 nt, Artificial Sequence
  source: /note="Description of Artificial Sequence: Synthetic oligonucleotide"
agaggcugacaauaagguuugacag

SEQ ID NO: 937 - RNA, 25 nt, Artificial Sequence
  source: /note="Description of Artificial Sequence: Synthetic oligonucleotide"
uauugaaaggaagaggcugacaaua

SEQ ID NO: 938 - RNA, 25 nt, Artificial Sequence
  source: /note="Description of Artificial Sequence: Synthetic oligonucleotide"
ccuuguauaccauauugaaaggaag

SEQ ID NO: 939 - RNA, 25 nt, Artificial Sequence
  source: /note="Description of Artificial Sequence: Synthetic oligonucleotide"
uuaagaccuuguauaccauauugaa

SEQ ID NO: 940 - RNA, 25 nt, Artificial Sequence
  source: /note="Description of Artificial Sequence: Synthetic oligonucleotide"
gauccagaucuacuugguugucaag

SEQ ID NO: 941 - RNA, 25 nt, Artificial Sequence
  source: /note="Description of Artificial Sequence: Synthetic oligonucleotide"
caaaagaaauagauccagaucuacu

SEQ ID NO: 942 - RNA, 25 nt, Artificial Sequence
  source: /note="Description of Artificial Sequence: Synthetic oligonucleotide"
uuuaauaaugucuuuuuaaaaauac

SEQ ID NO: 943 - RNA, 25 nt, Artificial Sequence
  source: /note="Description of Artificial Sequence: Synthetic oligonucleotide"
uggaacgcaauuaaauacacuagua

SEQ ID NO: 944 - RNA, 25 nt, Artificial Sequence
  source: /note="Description of Artificial Sequence: Synthetic oligonucleotide"
uugaauguguaaugugcaaaagccc

SEQ ID NO: 945 - RNA, 25 nt, Artificial Sequence
  source: /note="Description of Artificial Sequence: Synthetic oligonucleotide"
cuccuggugagagcuuaaaagaaau

SEQ ID NO: 946 - RNA, 25 nt, Artificial Sequence
  source: /note="Description of Artificial Sequence: Synthetic oligonucleotide"
gcuccuggugagagcuuaaaagaaa

SEQ ID NO: 947 - RNA, 25 nt, Artificial Sequence
  source: /note="Description of Artificial Sequence: Synthetic oligonucleotide"
accaguauaaaagcuacuuugcucc

SEQ ID NO: 948 - RNA, 25 nt, Artificial Sequence
  source: /note="Description of Artificial Sequence: Synthetic oligonucleotide"
uucuauauuguauuucucacaacaa

SEQ ID NO: 949 - RNA, 25 nt, Artificial Sequence
  source: /note="Description of Artificial Sequence: Synthetic oligonucleotide"
agcauugggugagguaauaaaccuu

SEQ ID NO: 950 - RNA, 25 nt, Artificial Sequence
  source: /note="Description of Artificial Sequence: Synthetic oligonucleotide"
uuguagcuuaauucagcauugggug

SEQ ID NO: 951 - RNA, 25 nt, Artificial Sequence
  source: /note="Description of Artificial Sequence: Synthetic oligonucleotide"
uaaacuuguagcuuaauucagcauu

SEQ ID NO: 952 - RNA, 25 nt, Artificial Sequence
  source: /note="Description of Artificial Sequence: Synthetic oligonucleotide"
auaaacuuguagcuuaauucagcau

SEQ ID NO: 953 - RNA, 25 nt, Artificial Sequence
  source: /note="Description of Artificial Sequence: Synthetic oligonucleotide"
cuuggaucuauuaaaaccacaucga

SEQ ID NO: 954 - RNA, 25 nt, Artificial Sequence
  source: /note="Description of Artificial Sequence: Synthetic oligonucleotide"
auuugguuuuaaaauaugagugccu

SEQ ID NO: 955 - RNA, 25 nt, Artificial Sequence
  source: /note="Description of Artificial Sequence: Synthetic oligonucleotide"
aacagaacaaguuuauucuaucauu

SEQ ID NO: 956 - RNA, 25 nt, Artificial Sequence
  source: /note="Description of Artificial Sequence: Synthetic oligonucleotide"
uguaucaauuggaaaggaagaaaaa

SEQ ID NO: 957 - RNA, 25 nt, Artificial Sequence
  source: /note="Description of Artificial Sequence: Synthetic oligonucleotide"
aaaggguuaaauguaucaauuggaa

SEQ ID NO: 958 - RNA, 25 nt, Artificial Sequence
  source: /note="Description of Artificial Sequence: Synthetic oligonucleotide"
ucucuaaaggguuaaauguaucaau

SEQ ID NO: 959 - RNA, 25 nt, Artificial Sequence
  source: /note="Description of Artificial Sequence: Synthetic oligonucleotide"
uaugagcuaaaugucugucucuaaa

SEQ ID NO: 960 - RNA, 25 nt, Artificial Sequence
  source: /note="Description of Artificial Sequence: Synthetic oligonucleotide"
cuaugagcuaaaugucugucucuaa

SEQ ID NO: 961 - RNA, 25 nt, Artificial Sequence
  source: /note="Description of Artificial Sequence: Synthetic oligonucleotide"
uaacgugaggaggaaaaacagucuu

SEQ ID NO: 962 - RNA, 25 nt, Artificial Sequence
  source: /note="Description of Artificial Sequence: Synthetic oligonucleotide"
uacaguuuuauuuuauaacgugagg

SEQ ID NO: 963 - RNA, 25 nt, Artificial Sequence
  source: /note="Description of Artificial Sequence: Synthetic oligonucleotide"
auguacaguuuuauuuuauaacgug

SEQ ID NO: 964 - RNA, 25 nt, Artificial Sequence
  source: /note="Description of Artificial Sequence: Synthetic oligonucleotide"
cuuagacagcauguaugguauguua

SEQ ID NO: 965 - RNA, 25 nt, Artificial Sequence
  source: /note="Description of Artificial Sequence: Synthetic oligonucleotide"
uuuuuuuaaacuuagacagcaugua

SEQ ID NO: 966 - RNA, 25 nt, Artificial Sequence
  source: /note="Description of Artificial Sequence: Synthetic oligonucleotide"
accguuugaaugcaugaucuguaug

SEQ ID NO: 967 - RNA, 25 nt, Artificial Sequence
  source: /note="Description of Artificial Sequence: Synthetic oligonucleotide"
caccguuugaaugcaugaucuguau

SEQ ID NO: 968 - RNA, 25 nt, Artificial Sequence
  source: /note="Description of Artificial Sequence: Synthetic oligonucleotide"
ucaccguuugaaugcaugaucugua

SEQ ID NO: 969 - RNA, 25 nt, Artificial Sequence
  source: /note="Description of Artificial Sequence: Synthetic oligonucleotide"
aucgcccuccagccccacucccugu

SEQ ID NO: 970 - RNA, 25 nt, Artificial Sequence
  source: /note="Description of Artificial Sequence: Synthetic oligonucleotide"
gaauaaugauauaaaaacugaauag

SEQ ID NO: 971 - RNA, 25 nt, Artificial Sequence
  source: /note="Description of Artificial Sequence: Synthetic oligonucleotide"
uacccuggagaaacacaugaaaaaa

SEQ ID NO: 972 - RNA, 25 nt, Artificial Sequence
  source: /note="Description of Artificial Sequence: Synthetic oligonucleotide"
augccuuuuagcguguacaguaccc

SEQ ID NO: 973 - RNA, 25 nt, Artificial Sequence
  source: /note="Description of Artificial Sequence: Synthetic oligonucleotide"
augaaaacgcauggccaggugggga

SEQ ID NO: 974 - RNA, 25 nt, Artificial Sequence
  source: /note="Description of Artificial Sequence: Synthetic oligonucleotide"
gcacaugaaaacgcauggccaggug

SEQ ID NO: 975 - RNA, 25 nt, Artificial Sequence
  source: /note="Description of Artificial Sequence: Synthetic oligonucleotide"
ggcacaugaaaacgcauggccaggu

SEQ ID NO: 976 - RNA, 25 nt, Artificial Sequence
  source: /note="Description of Artificial Sequence: Synthetic oligonucleotide"
aggcacaugaaaacgcauggccagg

SEQ ID NO: 977 - RNA, 25 nt, Artificial Sequence
  source: /note="Description of Artificial Sequence: Synthetic oligonucleotide"
accaggcacaugaaaacgcauggcc

SEQ ID NO: 978 - RNA, 25 nt, Artificial Sequence
  source: /note="Description of Artificial Sequence: Synthetic oligonucleotide"
agcucaccaggcacaugaaaacgca

SEQ ID NO: 979 - RNA, 25 nt, Artificial Sequence
  source: /note="Description of Artificial Sequence: Synthetic oligonucleotide"
cugugcccagaguagcaagcucacc

SEQ ID NO: 980 - RNA, 25 nt, Artificial Sequence
  source: /note="Description of Artificial Sequence: Synthetic oligonucleotide"
ccacaggagaagccacacgggcgaa

SEQ ID NO: 981 - RNA, 25 nt, Artificial Sequence
  source: /note="Description of Artificial Sequence: Synthetic oligonucleotide"
ucacuguccacaggagaagccacac

SEQ ID NO: 982 - RNA, 25 nt, Artificial Sequence
  source: /note="Description of Artificial Sequence: Synthetic oligonucleotide"
cucacuguccacaggagaagccaca

SEQ ID NO: 983 - RNA, 25 nt, Artificial Sequence
  source: /note="Description of Artificial Sequence: Synthetic oligonucleotide"
gaacuguagcaaucucacuguccac

SEQ ID NO: 984 - RNA, 25 nt, Artificial Sequence
  source: /note="Description of Artificial Sequence: Synthetic oligonucleotide"
acgcagcgacacuugugaguacugu

SEQ ID NO: 985 - RNA, 25 nt, Artificial Sequence
  source: /note="Description of Artificial Sequence: Synthetic oligonucleotide"
gacgcagcgacacuugugaguacug

SEQ ID NO: 986 - RNA, 25 nt, Artificial Sequence
  source: /note="Description of Artificial Sequence: Synthetic oligonucleotide"
gcccgggcaggcccagcucaaaaga

SEQ ID NO: 987 - RNA, 25 nt, Artificial Sequence
  source: /note="Description of Artificial Sequence: Synthetic oligonucleotide"
ggcccgggcaggcccagcucaaaag

SEQ ID NO: 988 - RNA, 25 nt, Artificial Sequence
  source: /note="Description of Artificial Sequence: Synthetic oligonucleotide"
ccauauuagugguccgggcccgggc

SEQ ID NO: 989 - RNA, 25 nt, Artificial Sequence
  source: /note="Description of Artificial Sequence: Synthetic oligonucleotide"
cgccccauauuagugguccgggccc

SEQ ID NO: 990 - RNA, 25 nt, Artificial Sequence
  source: /note="Description of Artificial Sequence: Synthetic oligonucleotide"
acgccccauauuagugguccgggcc

SEQ ID NO: 991 - RNA, 25 nt, Artificial Sequence
  source: /note="Description of Artificial Sequence: Synthetic oligonucleotide"
ggagcacgccccauauuaguggucc

SEQ ID NO: 992 - RNA, 25 nt, Artificial Sequence
  source: /note="Description of Artificial Sequence: Synthetic oligonucleotide"
gggagcacgccccauauuagugguc

SEQ ID NO: 993 - RNA, 25 nt, Artificial Sequence
  source: /note="Description of Artificial Sequence: Synthetic oligonucleotide"
guggagggagcacgccccauauuag

SEQ ID NO: 994 - RNA, 25 nt, Artificial Sequence
  source: /note="Description of Artificial Sequence: Synthetic oligonucleotide"
ggggcgcagcggcacgggaagugga

SEQ ID NO: 995 - RNA, 25 nt, Artificial Sequence
  source: /note="Description of Artificial Sequence: Synthetic oligonucleotide"
cggggcgcagcggcacgggaagugg

SEQ ID NO: 996 - RNA, 25 nt, Artificial Sequence
  source: /note="Description of Artificial Sequence: Synthetic oligonucleotide"
ucucggggcgcagcggcacgggaag

SEQ ID NO: 997 - RNA, 25 nt, Artificial Sequence
  source: /note="Description of Artificial Sequence: Synthetic oligonucleotide"
gagggaucucggggcgcagcggcac

SEQ ID NO: 998 - RNA, 25 nt, Artificial Sequence
  source: /note="Description of Artificial Sequence: Synthetic oligonucleotide"
ggagggaucucggggcgcagcggca

SEQ ID NO: 999 - RNA, 25 nt, Artificial Sequence
  source: /note="Description of Artificial Sequence: Synthetic oligonucleotide"
uggacggagggaucucggggcgcag

SEQ ID NO: 1000 - RNA, 25 nt, Artificial Sequence
  source: /note="Description of Artificial Sequence: Synthetic oligonucleotide"
cggggagcuggacggagggaucucg

SEQ ID NO: 1001 - RNA, 25 nt, Artificial Sequence
  source: /note="Description of Artificial Sequence: Synthetic oligonucleotide"
ccggggagcuggacggagggaucuc

SEQ ID NO: 1002 - RNA, 25 nt, Artificial Sequence
  source: /note="Description of Artificial Sequence: Synthetic oligonucleotide"
cccggggagcuggacggagggaucu

SEQ ID NO: 1003 - RNA, 25 nt, Artificial Sequence
  source: /note="Description of Artificial Sequence: Synthetic oligonucleotide"
cacaccgcccggggagcuggacgga

SEQ ID NO: 1004 - RNA, 25 nt, Artificial Sequence
  source: /note="Description of Artificial Sequence: Synthetic oligonucleotide"
ccacaccgcccggggagcuggacgg

SEQ ID NO: 1005 - RNA, 25 nt, Artificial Sequence
  source: /note="Description of Artificial Sequence: Synthetic oligonucleotide"
ucuccacaccgcccggggagcugga

SEQ ID NO: 1006 - RNA, 25 nt, Artificial Sequence
  source: /note="Description of Artificial Sequence: Synthetic oligonucleotide"
cgcuucuccacaccgcccggggagc

SEQ ID NO: 1007 - RNA, 25 nt, Artificial Sequence
  source: /note="Description of Artificial Sequence: Synthetic oligonucleotide"
aguuugcgcuucuccacaccgcccg

SEQ ID NO: 1008 - RNA, 25 nt, Artificial Sequence
  source: /note="Description of Artificial Sequence: Synthetic oligonucleotide"
gaguuugcgcuucuccacaccgccc

SEQ ID NO: 1009 - RNA, 25 nt, Artificial Sequence
  source: /note="Description of Artificial Sequence: Synthetic oligonucleotide"
ggaguuugcgcuucuccacaccgcc

SEQ ID NO: 1010 - RNA, 25 nt, Artificial Sequence
  source: /note="Description of Artificial Sequence: Synthetic oligonucleotide"
cucgucggagcacuccucggagaac

SEQ ID NO: 1011 - RNA, 25 nt, Artificial Sequence
  source: /note="Description of Artificial Sequence: Synthetic oligonucleotide"
ccucgucggagcacuccucggagaa

SEQ ID NO: 1012 - RNA, 25 nt, Artificial Sequence
  source: /note="Description of Artificial Sequence: Synthetic oligonucleotide"
uuugccuccucgucggagcacuccu

SEQ ID NO: 1013 - RNA, 25 nt, Artificial Sequence
  source: /note="Description of Artificial Sequence: Synthetic oligonucleotide"
agacaaucgccuuuugccuccucgu

SEQ ID NO: 1014 - RNA, 25 nt, Artificial Sequence
  source: /note="Description of Artificial Sequence: Synthetic oligonucleotide"
agcucaaagaucccuuccuuagcuu

SEQ ID NO: 1015 - RNA, 25 nt, Artificial Sequence
  source: /note="Description of Artificial Sequence: Synthetic oligonucleotide"
guggcucgccggcuacgcggccucc

SEQ ID NO: 1016 - RNA, 25 nt, Artificial Sequence
  source: /note="Description of Artificial Sequence: Synthetic oligonucleotide"
uacucgcaguggcucgccggcuacg

SEQ ID NO: 1017 - RNA, 25 nt, Artificial Sequence
  source: /note="Description of Artificial Sequence: Synthetic oligonucleotide"
agaacguguacucgcaguggcucgc

SEQ ID NO: 1018 - RNA, 25 nt, Artificial Sequence
  source: /note="Description of Artificial Sequence: Synthetic oligonucleotide"
caacacggagaacguguacucgcag

SEQ ID NO: 1019 - RNA, 25 nt, Artificial Sequence
  source: /note="Description of Artificial Sequence: Synthetic oligonucleotide"
cugcccccggccgcgaugcccaaca

SEQ ID NO: 1020 - RNA, 25 nt, Artificial Sequence
  source: /note="Description of Artificial Sequence: Synthetic oligonucleotide"
cucgagaaggaguucgaccugcccc

SEQ ID NO: 1021 - RNA, 25 nt, Artificial Sequence
  source: /note="Description of Artificial Sequence: Synthetic oligonucleotide"
uucucuaagcgcaucaagcucgaga

SEQ ID NO: 1022 - RNA, 25 nt, Artificial Sequence
  source: /note="Description of Artificial Sequence: Synthetic oligonucleotide"
ggggccuguccaaaaagcugcugcu

SEQ ID NO: 1023 - RNA, 25 nt, Artificial Sequence
  source: /note="Description of Artificial Sequence: Synthetic oligonucleotide"
gggggccuguccaaaaagcugcugc

SEQ ID NO: 1024 - RNA, 25 nt, Artificial Sequence
  source: /note="Description of Artificial Sequence: Synthetic oligonucleotide"
gcuccccgggcgagucggccucggg

SEQ ID NO: 1025 - RNA, 25 nt, Artificial Sequence
  source: /note="Description of Artificial Sequence: Synthetic oligonucleotide"
ugcuccccgggcgagucggccucgg

SEQ ID NO: 1026 - RNA, 25 nt, Artificial Sequence
  source: /note="Description of Artificial Sequence: Synthetic oligonucleotide"
cugcuccccgggcgagucggccucg

SEQ ID NO: 1027 - RNA, 25 nt, Artificial Sequence
  source: /note="Description of Artificial Sequence: Synthetic oligonucleotide"
gcugcuccccgggcgagucggccuc

SEQ ID NO: 1028 - RNA, 25 nt, Artificial Sequence
  source: /note="Description of Artificial Sequence: Synthetic oligonucleotide"
ggcugcuccccgggcgagucggccu

SEQ ID NO: 1029 - RNA, 25 nt, Artificial Sequence
  source: /note="Description of Artificial Sequence: Synthetic oligonucleotide"
ggccgcggcugcuccccgggcgagu

SEQ ID NO: 1030 - RNA, 25 nt, Artificial Sequence
  source: /note="Description of Artificial Sequence: Synthetic oligonucleotide"
cuguuaauggccgcggcugcucccc

SEQ ID NO: 1031 - RNA, 25 nt, Artificial Sequence
  source: /note="Description of Artificial Sequence: Synthetic oligonucleotide"
acuguuaauggccgcggcugcuccc

SEQ ID NO: 1032 - RNA, 25 nt, Artificial Sequence
  source: /note="Description of Artificial Sequence: Synthetic oligonucleotide"
uagacgauggcacuguuaauggccg

SEQ ID NO: 1033 - RNA, 25 nt, Artificial Sequence
  source: /note="Description of Artificial Sequence: Synthetic oligonucleotide"
accgcauagacgauggcacuguuaa

SEQ ID NO: 1034 - RNA, 25 nt, Artificial Sequence
  source: /note="Description of Artificial Sequence: Synthetic oligonucleotide"
ccggcgagucggaccgcauagacga

SEQ ID NO: 1035 - RNA, 25 nt, Artificial Sequence
  source: /note="Description of Artificial Sequence: Synthetic oligonucleotide"
gacgaagacucgguggccggcgagu

SEQ ID NO: 1036 - RNA, 25 nt, Artificial Sequence
  source: /note="Description of Artificial Sequence: Synthetic oligonucleotide"
acacuugcgacgaagacucgguggc

SEQ ID NO: 1037 - RNA, 25 nt, Artificial Sequence
  source: /note="Description of Artificial Sequence: Synthetic oligonucleotide"
agggacacuugcgacgaagacucgg

SEQ ID NO: 1038 - RNA, 25 nt, Artificial Sequence
  source: /note="Description of Artificial Sequence: Synthetic oligonucleotide"
cacagggacacuugcgacgaagacu

SEQ ID NO: 1039 - RNA, 25 nt, Artificial Sequence
  source: /note="Description of Artificial Sequence: Synthetic oligonucleotide"
caccuggccgaggccgagggccaca

SEQ ID NO: 1040 - RNA, 25 nt, Artificial Sequence
  source: /note="Description of Artificial Sequence: Synthetic oligonucleotide"
ccaccuggccgaggccgagggccac

SEQ ID NO: 1041 - RNA, 25 nt, Artificial Sequence
  source: /note="Description of Artificial Sequence: Synthetic oligonucleotide"
agcgcggccaccuggccgaggccga

SEQ ID NO: 1042 - RNA, 25 nt, Artificial Sequence
  source: /note="Description of Artificial Sequence: Synthetic oligonucleotide"
aagcgcggccaccuggccgaggccg

SEQ ID NO: 1043 - RNA, 25 nt, Artificial Sequence
  source: /note="Description of Artificial Sequence: Synthetic oligonucleotide"
aagcauaagcgcggccaccuggccg

SEQ ID NO: 1044 - RNA, 25 nt, Artificial Sequence
  source: /note="Description of Artificial Sequence: Synthetic oligonucleotide"
ggcgagaagcauaagcgcggccacc

SEQ ID NO: 1045 - RNA, 25 nt, Artificial Sequence
  source: /note="Description of Artificial Sequence: Synthetic oligonucleotide"
agguccugggcgagaagcauaagcg

SEQ ID NO: 1046 - RNA, 25 nt, Artificial Sequence
  source: /note="Description of Artificial Sequence: Synthetic oligonucleotide"
ucagcgaggccuuccaccagguccu

SEQ ID NO: 1047 - RNA, 25 nt, Artificial Sequence
  source: /note="Description of Artificial Sequence: Synthetic oligonucleotide"
uucagcgaggccuuccaccaggucc

SEQ ID NO: 1048 - RNA, 25 nt, Artificial Sequence
  source: /note="Description of Artificial Sequence: Synthetic oligonucleotide"
cagcacuucagcgaggccuuccacc

SEQ ID NO: 1049 - RNA, 25 nt, Artificial Sequence
  source: /note="Description of Artificial Sequence: Synthetic oligonucleotide"
cucagcuccaugcagcacuucagcg

SEQ ID NO: 1050 - RNA, 25 nt, Artificial Sequence
  source: /note="Description of Artificial Sequence: Synthetic oligonucleotide"
gcccugcccgacgucaugcagggca

SEQ ID NO: 1051 - RNA, 25 nt, Artificial Sequence
  source: /note="Description of Artificial Sequence: Synthetic oligonucleotide"
gccgcgcccugcccgacgucaugca

SEQ ID NO: 1052 - RNA, 25 nt, Artificial Sequence
  source: /note="Description of Artificial Sequence: Synthetic oligonucleotide"
agccgcgcccugcccgacgucaugc

SEQ ID NO: 1053 - RNA, 25 nt, Artificial Sequence
  source: /note="Description of Artificial Sequence: Synthetic oligonucleotide"
gcucgcggggcgcggucgugggcgu

SEQ ID NO: 1054 - RNA, 25 nt, Artificial Sequence
  source: /note="Description of Artificial Sequence: Synthetic oligonucleotide"
agcucgcggggcgcggucgugggcg

SEQ ID NO: 1055 - RNA, 25 nt, Artificial Sequence
  source: /note="Description of Artificial Sequence: Synthetic oligonucleotide"
agaacagcucgcggggcgcggucgu

SEQ ID NO: 1056 - RNA, 25 nt, Artificial Sequence
  source: /note="Description of Artificial Sequence: Synthetic oligonucleotide"
gagaacagcucgcggggcgcggucg

SEQ ID NO: 1057 - RNA, 25 nt, Artificial Sequence
  source: /note="Description of Artificial Sequence: Synthetic oligonucleotide"
caccacgagaacagcucgcggggcg

SEQ ID NO: 1058 - RNA, 25 nt, Artificial Sequence
  source: /note="Description of Artificial Sequence: Synthetic oligonucleotide"
cgcgccaccacgagaacagcucgcg

SEQ ID NO: 1059 - RNA, 25 nt, Artificial Sequence
  source: /note="Description of Artificial Sequence: Synthetic oligonucleotide"
gcgcgccaccacgagaacagcucgc

SEQ ID NO: 1060 - RNA, 25 nt, Artificial Sequence
  source: /note="Description of Artificial Sequence: Synthetic oligonucleotide"
ggcgcgccaccacgagaacagcucg

SEQ ID NO: 1061 - RNA, 25 nt, Artificial Sequence
  source: /note="Description of Artificial Sequence: Synthetic oligonucleotide"
uacggcuucgggcugagccuggagg

SEQ ID NO: 1062 - RNA, 25 nt, Artificial Sequence
  source: /note="Description of Artificial Sequence: Synthetic oligonucleotide"
gacuacggcuucgggcugagccugg

SEQ ID NO: 1063 - RNA, 25 nt, Artificial Sequence
  source: /note="Description of Artificial Sequence: Synthetic oligonucleotide"
cuggacuacggcuucgggcugagcc

SEQ ID NO: 1064 - RNA, 25 nt, Artificial Sequence
  source: /note="Description of Artificial Sequence: Synthetic oligonucleotide"
cucgcucucccuggacuacggcuuc

SEQ ID NO: 1065 - RNA, 25 nt, Artificial Sequence
  source: /note="Description of Artificial Sequence: Synthetic oligonucleotide"
ucucgcucucccuggacuacggcuu

SEQ ID NO: 1066 - RNA, 25 nt, Artificial Sequence
  source: /note="Description of Artificial Sequence: Synthetic oligonucleotide"
acugccucucgcucucccuggacua

SEQ ID NO: 1067 - RNA, 25 nt, Artificial Sequence
  source: /note="Description of Artificial Sequence: Synthetic oligonucleotide"
cuccucgacugccucucgcucuccc

SEQ ID NO: 1068 - RNA, 25 nt, Artificial Sequence
  source: /note="Description of Artificial Sequence: Synthetic oligonucleotide"
gccagcagcgcgcucaaguccgugg

SEQ ID NO: 1069 - RNA, 25 nt, Artificial Sequence
  source: /note="Description of Artificial Sequence: Synthetic oligonucleotide"
agcgccagcagcgcgcucaaguccg

SEQ ID NO: 1070 - RNA, 25 nt, Artificial Sequence
  source: /note="Description of Artificial Sequence: Synthetic oligonucleotide"
cggaacccggcaccagcgacuuggu

SEQ ID NO: 1071 - RNA, 25 nt, Artificial Sequence
  source: /note="Description of Artificial Sequence: Synthetic oligonucleotide"
ccggaacccggcaccagcgacuugg

SEQ ID NO: 1072 - RNA, 25 nt, Artificial Sequence
  source: /note="Description of Artificial Sequence: Synthetic oligonucleotide"
uccccggaacccggcaccagcgacu

SEQ ID NO: 1073 - RNA, 25 nt, Artificial Sequence
  source: /note="Description of Artificial Sequence: Synthetic oligonucleotide"
ucuccaccgccagcuccccggaacc

SEQ ID NO: 1074 - RNA, 25 nt, Artificial Sequence
  source: /note="Description of Artificial Sequence: Synthetic oligonucleotide"
gacggucucuccaccgccagcuccc

SEQ ID NO: 1075 - RNA, 25 nt, Artificial Sequence
  source: /note="Description of Artificial Sequence: Synthetic oligonucleotide"
cccccaugacggucaaguccgacga

SEQ ID NO: 1076 - RNA, 25 nt, Artificial Sequence
  source: /note="Description of Artificial Sequence: Synthetic oligonucleotide"
cacaugcacaaaucgucccccauga

SEQ ID NO: 1077 - RNA, 25 nt, Artificial Sequence
  source: /note="Description of Artificial Sequence: Synthetic oligonucleotide"
aaccugugcgaccacgcgugcaccc

SEQ ID NO: 1078 - RNA, 25 nt, Artificial Sequence
  source: /note="Description of Artificial Sequence: Synthetic oligonucleotide"
ugguggugcaccggcgcagccacac

SEQ ID NO: 1079 - RNA, 25 nt, Artificial Sequence
  source: /note="Description of Artificial Sequence: Synthetic oligonucleotide"
cugguggugcaccggcgcagccaca

SEQ ID NO: 1080 - RNA, 25 nt, Artificial Sequence
  source: /note="Description of Artificial Sequence: Synthetic oligonucleotide"
auuucagagcaaccugguggugcac

SEQ ID NO: 1081 - RNA, 25 nt, Artificial Sequence
  source: /note="Description of Artificial Sequence: Synthetic oligonucleotide"
acguucaaauuucagagcaaccugg

SEQ ID NO: 1082 - RNA, 25 nt, Artificial Sequence
  source: /note="Description of Artificial Sequence: Synthetic oligonucleotide"
aagacguucaaauuucagagcaacc

SEQ ID NO: 1083 - RNA, 25 nt, Artificial Sequence
  source: /note="Description of Artificial Sequence: Synthetic oligonucleotide"
ucaaguccaagucaugcgaguucug

SEQ ID NO: 1084 - RNA, 25 nt, Artificial Sequence
  source: /note="Description of Artificial Sequence: Synthetic oligonucleotide"
uccgccccuccucccucccagcccc

SEQ ID NO: 1085 - RNA, 25 nt, Artificial Sequence
  source: /note="Description of Artificial Sequence: Synthetic oligonucleotide"
cagccagguagcaagccgcccuucc

SEQ ID NO: 1086 - RNA, 25 nt, Artificial Sequence
  source: /note="Description of Artificial Sequence: Synthetic oligonucleotide"
aaagguuacugcaaccauuccagcc

SEQ ID NO: 1087 - RNA, 25 nt, Artificial Sequence
  source: /note="Description of Artificial Sequence: Synthetic oligonucleotide"
cccaggccggcccagcccuaugcaa

SEQ ID NO: 1088 - RNA, 25 nt, Artificial Sequence
  source: /note="Description of Artificial Sequence: Synthetic oligonucleotide"
gucuagcccaccgcuguccccaggc

SEQ ID NO: 1089 - RNA, 25 nt, Artificial Sequence
  source: /note="Description of Artificial Sequence: Synthetic oligonucleotide"
acacgucuagcccaccgcugucccc

SEQ ID NO: 1090 - RNA, 25 nt, Artificial Sequence
  source: /note="Description of Artificial Sequence: Synthetic oligonucleotide"
cucuaggagacuuagagagcuggca

SEQ ID NO: 1091 - RNA, 25 nt, Artificial Sequence
  source: /note="Description of Artificial Sequence: Synthetic oligonucleotide"
ucucuaggagacuuagagagcuggc

SEQ ID NO: 1092 - RNA, 25 nt, Artificial Sequence
  source: /note="Description of Artificial Sequence: Synthetic oligonucleotide"
gauuucucuaggagacuuagagagc

SEQ ID NO: 1093 - RNA, 25 nt, Artificial Sequence
  source: /note="Description of Artificial Sequence: Synthetic oligonucleotide"
ggagccucccgccauggauuucucu

SEQ ID NO: 1094 - RNA, 25 nt, Artificial Sequence
  source: /note="Description of Artificial Sequence: Synthetic oligonucleotide"
ccaauggcuauggagccucccgcca

SEQ ID NO: 1095 - RNA, 25 nt, Artificial Sequence
  source: /note="Description of Artificial Sequence: Synthetic oligonucleotide"
gugcugcgguugaauccaauggcua

SEQ ID NO: 1096 - RNA, 25 nt, Artificial Sequence
  source: /note="Description of Artificial Sequence: Synthetic oligonucleotide"
gacagggugcugcgguugaauccaa

SEQ ID NO: 1097 - RNA, 25 nt, Artificial Sequence
  source: /note="Description of Artificial Sequence: Synthetic oligonucleotide"
cccgagugccuuugacagggugcug

SEQ ID NO: 1098 - RNA, 25 nt, Artificial Sequence
  source: /note="Description of Artificial Sequence: Synthetic oligonucleotide"
acccaucacccgagugccuuugaca

SEQ ID NO: 1099 - RNA, 25 nt, Artificial Sequence
  source: /note="Description of Artificial Sequence: Synthetic oligonucleotide"
cacccaucacccgagugccuuugac

SEQ ID NO: 1100 - RNA, 25 nt, Artificial Sequence
  source: /note="Description of Artificial Sequence: Synthetic oligonucleotide"
cgccugggggcggaagagauggccc

SEQ ID NO: 1101 - RNA, 25 nt, Artificial Sequence
  source: /note="Description of Artificial Sequence: Synthetic oligonucleotide"
auagagcgccugggggcggaagaga

SEQ ID NO: 1102 - RNA, 25 nt, Artificial Sequence
  source: /note="Description of Artificial Sequence: Synthetic oligonucleotide"
ccccaccgcauagagcgccuggggg

SEQ ID NO: 1103 - RNA, 25 nt, Artificial Sequence
  source: /note="Description of Artificial Sequence: Synthetic oligonucleotide"
gacccccaccgcauagagcgccugg

SEQ ID NO: 1104 - RNA, 25 nt, Artificial Sequence
  source: /note="Description of Artificial Sequence: Synthetic oligonucleotide"
ggacccccaccgcauagagcgccug

SEQ ID NO: 1105 - RNA, 25 nt, Artificial Sequence
  source: /note="Description of Artificial Sequence: Synthetic oligonucleotide"
uggacccccaccgcauagagcgccu

SEQ ID NO: 1106 - RNA, 25 nt, Artificial Sequence
  source: /note="Description of Artificial Sequence: Synthetic oligonucleotide"
uuggacccccaccgcauagagcgcc

SEQ ID NO: 1107 - RNA, 25 nt, Artificial Sequence
  source: /note="Description of Artificial Sequence: Synthetic oligonucleotide"
uuuaguccaccaccgagacaucacu

SEQ ID NO: 1108 - RNA, 25 nt, Artificial Sequence
  source: /note="Description of Artificial Sequence: Synthetic oligonucleotide"
gagagaggcuuccggccuggcagaa

SEQ ID NO: 1109 - RNA, 25 nt, Artificial Sequence
  source: /note="Description of Artificial Sequence: Synthetic oligonucleotide"
cgagagaggcuuccggccuggcaga

SEQ ID NO: 1110 - RNA, 25 nt, Artificial Sequence
  source: /note="Description of Artificial Sequence: Synthetic oligonucleotide"
ucaguaucgagagaggcuuccggcc

SEQ ID NO: 1111 - RNA, 25 nt, Artificial Sequence
  source: /note="Description of Artificial Sequence: Synthetic oligonucleotide"
caggaucaguaucgagagaggcuuc

SEQ ID NO: 1112 - RNA, 25 nt, Artificial Sequence
  source: /note="Description of Artificial Sequence: Synthetic oligonucleotide"
agaauaccaggaucaguaucgagag

SEQ ID NO: 1113 - RNA, 25 nt, Artificial Sequence
  source: /note="Description of Artificial Sequence: Synthetic oligonucleotide"
accccuuuaaccugcuaagaauacc

SEQ ID NO: 1114 - RNA, 25 nt, Artificial Sequence
  source: /note="Description of Artificial Sequence: Synthetic oligonucleotide"
auguccuucccagccaccucuccau

SEQ ID NO: 1115 - RNA, 25 nt, Artificial Sequence
  source: /note="Description of Artificial Sequence: Synthetic oligonucleotide"
aauguccuucccagccaccucucca

SEQ ID NO: 1116 - RNA, 25 nt, Artificial Sequence
  source: /note="Description of Artificial Sequence: Synthetic oligonucleotide"
cgcggguugguaucccuucaggacu

SEQ ID NO: 1117 - RNA, 25 nt, Artificial Sequence
  source: /note="Description of Artificial Sequence: Synthetic oligonucleotide"
ugaccccgcggguugguaucccuuc

SEQ ID NO: 1118 - RNA, 25 nt, Artificial Sequence
  source: /note="Description of Artificial Sequence: Synthetic oligonucleotide"
acggaaguccccugaccccgcgggu

SEQ ID NO: 1119 - RNA, 25 nt, Artificial Sequence
  source: /note="Description of Artificial Sequence: Synthetic oligonucleotide"
gaacacggaaguccccugaccccgc

SEQ ID NO: 1120 - RNA, 25 nt, Artificial Sequence
  source: /note="Description of Artificial Sequence: Synthetic oligonucleotide"
cgaacacggaaguccccugaccccg

SEQ ID NO: 1121 - RNA, 25 nt, Artificial Sequence
  source: /note="Description of Artificial Sequence: Synthetic oligonucleotide"
uaagaaucuacuuagaaagcgaaca

SEQ ID NO: 1122 - RNA, 25 nt, Artificial Sequence
  source: /note="Description of Artificial Sequence: Synthetic oligonucleotide"
ucuugcaacacgcacagaacacuca

SEQ ID NO: 1123 - RNA, 25 nt, Artificial Sequence
  source: /note="Description of Artificial Sequence: Synthetic oligonucleotide"
uugcaaacagccauucaccagugca

SEQ ID NO: 1124 - RNA, 25 nt, Artificial Sequence
  source: /note="Description of Artificial Sequence: Synthetic oligonucleotide"
uaaggcucaacuuacaaauacccug

SEQ ID NO: 1125 - RNA, 25 nt, Artificial Sequence
  source: /note="Description of Artificial Sequence: Synthetic oligonucleotide"
aaggcucaacuuacaaauacccugc

SEQ ID NO: 1126 - RNA, 25 nt, Artificial Sequence
  source: /note="Description of Artificial Sequence: Synthetic oligonucleotide"
aggcucaacuuacaaauacccugcg

SEQ ID NO: 1127 - RNA, 25 nt, Artificial Sequence
  source: /note="Description of Artificial Sequence: Synthetic oligonucleotide"
gcggggcauauucugcacucauccc

SEQ ID NO: 1128 - RNA, 25 nt, Artificial Sequence
  source: /note="Description of Artificial Sequence: Synthetic oligonucleotide"
gcauauucugcacucaucccaggcg

SEQ ID NO: 1129 - RNA, 25 nt, Artificial Sequence
  source: /note="Description of Artificial Sequence: Synthetic oligonucleotide"
cauauucugcacucaucccaggcgu

SEQ ID NO: 1130 - RNA, 25 nt, Artificial Sequence
  source: /note="Description of Artificial Sequence: Synthetic oligonucleotide"
auauucugcacucaucccaggcgug

SEQ ID NO: 1131 - RNA, 25 nt, Artificial Sequence
  source: /note="Description of Artificial Sequence: Synthetic oligonucleotide"
ggauuagagcuccaugugcagaacg

SEQ ID NO: 1132 - RNA, 25 nt, Artificial Sequence
  source: /note="Description of Artificial Sequence: Synthetic oligonucleotide"
gauuagagcuccaugugcagaacga

SEQ ID NO: 1133 - RNA, 25 nt, Artificial Sequence
  source: /note="Description of Artificial Sequence: Synthetic oligonucleotide"
auuagagcuccaugugcagaacgag

SEQ ID NO: 1134 - RNA, 25 nt, Artificial Sequence
  source: /note="Description of Artificial Sequence: Synthetic oligonucleotide"
agagcuccaugugcagaacgagggg

SEQ ID NO: 1135 - RNA, 25 nt, Artificial Sequence
  source: /note="Description of Artificial Sequence: Synthetic oligonucleotide"
uccaugugcagaacgaggggaggag

SEQ ID NO: 1136 - RNA, 25 nt, Artificial Sequence
  source: /note="Description of Artificial Sequence: Synthetic oligonucleotide"
ggaugagugcagaauaugccccgca

SEQ ID NO: 1137 - RNA, 25 nt, Artificial Sequence
  source: /note="Description of Artificial Sequence: Synthetic oligonucleotide"
gggaugagugcagaauaugccccgc

SEQ ID NO: 1138 - RNA, 25 nt, Artificial Sequence
  source: /note="Description of Artificial Sequence: Synthetic oligonucleotide"
acauggagcucuaauccccacgccu

SEQ ID NO: 1139 - RNA, 25 nt, Artificial Sequence
  source: /note="Description of Artificial Sequence: Synthetic oligonucleotide"
cacauggagcucuaauccccacgcc

SEQ ID NO: 1140 - RNA, 25 nt, Artificial Sequence
  source: /note="Description of Artificial Sequence: Synthetic oligonucleotide"
gccucuccuccccucguucugcaca

SEQ ID NO: 1141 - RNA, 25 nt, Artificial Sequence
  source: /note="Description of Artificial Sequence: Synthetic oligonucleotide"
ucacagauaaacuucugcacuggag

SEQ ID NO: 1142 - RNA, 25 nt, Artificial Sequence
  source: /note="Description of Artificial Sequence: Synthetic oligonucleotide"
uucacagauaaacuucugcacugga

SEQ ID NO: 1143 - RNA, 25 nt, Artificial Sequence
  source: /note="Description of Artificial Sequence: Synthetic oligonucleotide"
uuucacagauaaacuucugcacugg

SEQ ID NO: 1144 - RNA, 25 nt, Artificial Sequence
  source: /note="Description of Artificial Sequence: Synthetic oligonucleotide"
uucuuucacagauaaacuucugcac

SEQ ID NO: 1145 - RNA, 25 nt, Artificial Sequence
  source: /note="Description of Artificial Sequence: Synthetic oligonucleotide"
cauuuaccugcuauguguuccuguu

SEQ ID NO: 1146 - RNA, 25 nt, Artificial Sequence
  source: /note="Description of Artificial Sequence: Synthetic oligonucleotide"
auuuaccugcuauguguuccuguuu

SEQ ID NO: 1147 - RNA, 25 nt, Artificial Sequence
  source: /note="Description of Artificial Sequence: Synthetic oligonucleotide"
uuuaccugcuauguguuccuguuug

SEQ ID NO: 1148 - RNA, 25 nt, Artificial Sequence
  source: /note="Description of Artificial Sequence: Synthetic oligonucleotide"
acguugauaaacaaucgucauccuc

SEQ ID NO: 1149 - RNA, 25 nt, Artificial Sequence
  source: /note="Description of Artificial Sequence: Synthetic oligonucleotide"
acaaucgucauccucuggcgugacc

SEQ ID NO: 1150 - RNA, 25 nt, Artificial Sequence
  source: /note="Description of Artificial Sequence: Synthetic oligonucleotide"
ggcgugaccuggaugccaaccucca

SEQ ID NO: 1151 - RNA, 25 nt, Artificial Sequence
  source: /note="Description of Artificial Sequence: Synthetic oligonucleotide"
gcgugaccuggaugccaaccuccac

SEQ ID NO: 1152 - RNA, 25 nt, Artificial Sequence
  source: /note="Description of Artificial Sequence: Synthetic oligonucleotide"
accuggaugccaaccuccacgggau

SEQ ID NO: 1153 - RNA, 25 nt, Artificial Sequence
  source: /note="Description of Artificial Sequence: Synthetic oligonucleotide"
gauuggaugcuuuuuucaucucgau

SEQ ID NO: 1154 - RNA, 25 nt, Artificial Sequence
  source: /note="Description of Artificial Sequence: Synthetic oligonucleotide"
augcuuuuuucaucucgauugguga

SEQ ID NO: 1155 - RNA, 25 nt, Artificial Sequence
  source: /note="Description of Artificial Sequence: Synthetic oligonucleotide"
ugcuuuuuucaucucgauuggugaa

SEQ ID NO: 1156 - RNA, 25 nt, Artificial Sequence
  source: /note="Description of Artificial Sequence: Synthetic oligonucleotide"
gcuuuuuucaucucgauuggugaag

SEQ ID NO: 1157 - RNA, 25 nt, Artificial Sequence
  source: /note="Description of Artificial Sequence: Synthetic oligonucleotide"
uuuucaucucgauuggugaagggga

SEQ ID NO: 1158 - RNA, 25 nt, Artificial Sequence
  source: /note="Description of Artificial Sequence: Synthetic oligonucleotide"
ucaucucgauuggugaaggggaagg

SEQ ID NO: 1159 - RNA, 25 nt, Artificial Sequence
  source: /note="Description of Artificial Sequence: Synthetic oligonucleotide"
cuuauccacagcuuuuucuaagcag

SEQ ID NO: 1160 - RNA, 25 nt, Artificial Sequence
  source: /note="Description of Artificial Sequence: Synthetic oligonucleotide"
cgauaaaaauaagaaugucccccaa

SEQ ID NO: 1161 - RNA, 25 nt, Artificial Sequence
  source: /note="Description of Artificial Sequence: Synthetic oligonucleotide"
gauaaaaauaagaaugucccccaau

SEQ ID NO: 1162 - RNA, 25 nt, Artificial Sequence
  source: /note="Description of Artificial Sequence: Synthetic oligonucleotide"
aaugucccccaaugggaaguucauc

SEQ ID NO: 1163 - RNA, 25 nt, Artificial Sequence
  source: /note="Description of Artificial Sequence: Synthetic oligonucleotide"
gggaaguucaucuggcacugcccac

SEQ ID NO: 1164 - RNA, 25 nt, Artificial Sequence
  source: /note="Description of Artificial Sequence: Synthetic oligonucleotide"
guucaucuggcacugcccacaggug

SEQ ID NO: 1165 - RNA, 25 nt, Artificial Sequence
  source: /note="Description of Artificial Sequence: Synthetic oligonucleotide"
caucuggcacugcccacaggugagg

SEQ ID NO: 1166 - RNA, 25 nt, Artificial Sequence
  source: /note="Description of Artificial Sequence: Synthetic oligonucleotide"
aggugaggaggucaugauccccuuc

SEQ ID NO: 1167 - RNA, 25 nt, Artificial Sequence
  source: /note="Description of Artificial Sequence: Synthetic oligonucleotide"
caugauccccuucuggagcucccaa

SEQ ID NO: 1168 - RNA, 25 nt, Artificial Sequence
  source: /note="Description of Artificial Sequence: Synthetic oligonucleotide"
augauccccuucuggagcucccaac

SEQ ID NO: 1169 - RNA, 25 nt, Artificial Sequence
  source: /note="Description of Artificial Sequence: Synthetic oligonucleotide"
cccuucuggagcucccaacgggccg

SEQ ID NO: 1170 - RNA, 25 nt, Artificial Sequence
  source: /note="Description of Artificial Sequence: Synthetic oligonucleotide"
cuggagcucccaacgggccgugguc

SEQ ID NO: 1171 - RNA, 25 nt, Artificial Sequence
  source: /note="Description of Artificial Sequence: Synthetic oligonucleotide"
uggucugguucaucaucuguaagaa

SEQ ID NO: 1172 - RNA, 25 nt, Artificial Sequence
  source: /note="Description of Artificial Sequence: Synthetic oligonucleotide"
caucaucuguaagaauggcuucaag

SEQ ID NO: 1173 - RNA, 25 nt, Artificial Sequence
  source: /note="Description of Artificial Sequence: Synthetic oligonucleotide"
ucuguaagaauggcuucaagaggcu

SEQ ID NO: 1174 - RNA, 25 nt, Artificial Sequence
  source: /note="Description of Artificial Sequence: Synthetic oligonucleotide"
agaauggcuucaagaggcucggcug

SEQ ID NO: 1175 - RNA, 25 nt, Artificial Sequence
  source: /note="Description of Artificial Sequence: Synthetic oligonucleotide"
uggcuucaagaggcucggcuguggu

SEQ ID NO: 1176 - RNA, 25 nt, Artificial Sequence
  source: /note="Description of Artificial Sequence: Synthetic oligonucleotide"
acacauagcagguaaaugagaagca

SEQ ID NO: 1177 - RNA, 25 nt, Artificial Sequence
  source: /note="Description of Artificial Sequence: Synthetic oligonucleotide"
uuugccccaaacaggaacacauagc

SEQ ID NO: 1178 - RNA, 25 nt, Artificial Sequence
  source: /note="Description of Artificial Sequence: Synthetic oligonucleotide"
ucaucuagaggaauuugccccaaac

SEQ ID NO: 1179 - RNA, 25 nt, Artificial Sequence
  source: /note="Description of Artificial Sequence: Synthetic oligonucleotide"
acgauuguuuaucaacgucaucuag

SEQ ID NO: 1180 - RNA, 25 nt, Artificial Sequence
  source: /note="Description of Artificial Sequence: Synthetic oligonucleotide"
gagguuggcauccaggucacgccag

SEQ ID NO: 1181 - RNA, 25 nt, Artificial Sequence
  source: /note="Description of Artificial Sequence: Synthetic oligonucleotide"
uccaaucccguggagguuggcaucc

SEQ ID NO: 1182 - RNA, 25 nt, Artificial Sequence
  source: /note="Description of Artificial Sequence: Synthetic oligonucleotide"
aaaaagcauccaaucccguggaggu

SEQ ID NO: 1183 - RNA, 25 nt, Artificial Sequence
  source: /note="Description of Artificial Sequence: Synthetic oligonucleotide"
augaaaaaagcauccaaucccgugg

SEQ ID NO: 1184 - RNA, 25 nt, Artificial Sequence
  source: /note="Description of Artificial Sequence: Synthetic oligonucleotide"
gagaugaaaaaagcauccaaucccg

SEQ ID NO: 1185 - RNA, 25 nt, Artificial Sequence
  source: /note="Description of Artificial Sequence: Synthetic oligonucleotide"
ggcagccucugcuuagaaaaagcug

SEQ ID NO: 1186 - RNA, 25 nt, Artificial Sequence
  source: /note="Description of Artificial Sequence: Synthetic oligonucleotide"
ucgagcacaaacggaaacaaugcaa

SEQ ID NO: 1187 - RNA, 25 nt, Artificial Sequence
  source: /note="Description of Artificial Sequence: Synthetic oligonucleotide"
cauucuuauuuuuaucgagcacaaa

SEQ ID NO: 1188 - RNA, 25 nt, Artificial Sequence
  source: /note="Description of Artificial Sequence: Synthetic oligonucleotide"
cagugccagaugaacuucccauugg

SEQ ID NO: 1189 - RNA, 25 nt, Artificial Sequence
  source: /note="Description of Artificial Sequence: Synthetic oligonucleotide"
gcagugccagaugaacuucccauug

SEQ ID NO: 1190 - RNA, 25 nt, Artificial Sequence
  source: /note="Description of Artificial Sequence: Synthetic oligonucleotide"
ggcagugccagaugaacuucccauu

SEQ ID NO: 1191 - RNA, 25 nt, Artificial Sequence
  source: /note="Description of Artificial Sequence: Synthetic oligonucleotide"
gggcagugccagaugaacuucccau

SEQ ID NO: 1192 - RNA, 25 nt, Artificial Sequence
  source: /note="Description of Artificial Sequence: Synthetic oligonucleotide"
aggggaucaugaccuccucaccugu

SEQ ID NO: 1193 - RNA, 25 nt, Artificial Sequence
  source: /note="Description of Artificial Sequence: Synthetic oligonucleotide"
aaggggaucaugaccuccucaccug

SEQ ID NO: 1194 - RNA, 25 nt, Artificial Sequence
  source: /note="Description of Artificial Sequence: Synthetic oligonucleotide"
cacggcccguugggagcuccagaag

SEQ ID NO: 1195 - RNA, 25 nt, Artificial Sequence
  source: /note="Description of Artificial Sequence: Synthetic oligonucleotide"
ccacggcccguugggagcuccagaa

SEQ ID NO: 1196 - RNA, 25 nt, Artificial Sequence
  source: /note="Description of Artificial Sequence: Synthetic oligonucleotide"
accacggcccguugggagcuccaga

SEQ ID NO: 1197 - RNA, 25 nt, Artificial Sequence
  source: /note="Description of Artificial Sequence: Synthetic oligonucleotide"
augaugaaccagaccacggcccguu

SEQ ID NO: 1198 - RNA, 25 nt, Artificial Sequence
  source: /note="Description of Artificial Sequence: Synthetic oligonucleotide"
gaugaugaaccagaccacggcccgu

SEQ ID NO: 1199 - RNA, 25 nt, Artificial Sequence
  source: /note="Description of Artificial Sequence: Synthetic oligonucleotide"
uucuuacagaugaugaaccagacca

SEQ ID NO: 1200 - RNA, 25 nt, Artificial Sequence
  source: /note="Description of Artificial Sequence: Synthetic oligonucleotide"
cgagaauucccguuugcuuaagugc

SEQ ID NO: 1201 - RNA, 25 nt, Artificial Sequence
  source: /note="Description of Artificial Sequence: Synthetic oligonucleotide"
gagaauucccguuugcuuaagugcu

SEQ ID NO: 1202 - RNA, 25 nt, Artificial Sequence
  source: /note="Description of Artificial Sequence: Synthetic oligonucleotide"
agaauucccguuugcuuaagugcug

SEQ ID NO: 1203 - RNA, 25 nt, Artificial Sequence
  source: /note="Description of Artificial Sequence: Synthetic oligonucleotide"
uaagugcugggguuugccuugcuug

SEQ ID NO: 1204 - RNA, 25 nt, Artificial Sequence
  source: /note="Description of Artificial Sequence: Synthetic oligonucleotide"
gguuugccuugcuugcggcgagaca

SEQ ID NO: 1205 - RNA, 25 nt, Artificial Sequence
  source: /note="Description of Artificial Sequence: Synthetic oligonucleotide"
uugccuugcuugcggcgagacaugg

SEQ ID NO: 1206 - RNA, 25 nt, Artificial Sequence
  source: /note="Description of Artificial Sequence: Synthetic oligonucleotide"
ugccuugcuugcggcgagacauggu

SEQ ID NO: 1207 - RNA, 25 nt, Artificial Sequence
  source: /note="Description of Artificial Sequence: Synthetic oligonucleotide"
gcuugcggcgagacauggugggcug

SEQ ID NO: 1208 - RNA, 25 nt, Artificial Sequence
  source: /note="Description of Artificial Sequence: Synthetic oligonucleotide"
cuugcggcgagacauggugggcugc

SEQ ID NO: 1209 - RNA, 25 nt, Artificial Sequence
  source: /note="Description of Artificial Sequence: Synthetic oligonucleotide"
uugcggcgagacauggugggcugcg

SEQ ID NO: 1210 - RNA, 25 nt, Artificial Sequence
  source: /note="Description of Artificial Sequence: Synthetic oligonucleotide"
cggcggcggcggcggcggcggcggg

SEQ ID NO: 1211 - RNA, 25 nt, Artificial Sequence
  source: /note="Description of Artificial Sequence: Synthetic oligonucleotide"
ggcggcggcggcggcgggcggacga

SEQ ID NO: 1212 - RNA, 25 nt, Artificial Sequence
  source: /note="Description of Artificial Sequence: Synthetic oligonucleotide"
cggcggcggcgggcggacgacggcu

SEQ ID NO: 1213 - RNA, 25 nt, Artificial Sequence
  source: /note="Description of Artificial Sequence: Synthetic oligonucleotide"
gggcggacgacggcucgguucacau

SEQ ID NO: 1214 - RNA, 25 nt, Artificial Sequence
  source: /note="Description of Artificial Sequence: Synthetic oligonucleotide"
ggcggacgacggcucgguucacauc

SEQ ID NO: 1215 - RNA, 25 nt, Artificial Sequence
  source: /note="Description of Artificial Sequence: Synthetic oligonucleotide"
acggcucgguucacaucgggagagc

SEQ ID NO: 1216 - RNA, 25 nt, Artificial Sequence
  source: /note="Description of Artificial Sequence: Synthetic oligonucleotide"
cggcucgguucacaucgggagagcc

SEQ ID NO: 1217 - RNA, 25 nt, Artificial Sequence
  source: /note="Description of Artificial Sequence: Synthetic oligonucleotide"
caucgggagagccggguuagaaaga

SEQ ID NO: 1218 - RNA, 25 nt, Artificial Sequence
  source: /note="Description of Artificial Sequence: Synthetic oligonucleotide"
aaauaaauuagaaauaauacaaaga

SEQ ID NO: 1219 - RNA, 25 nt, Artificial Sequence
  source: /note="Description of Artificial Sequence: Synthetic oligonucleotide"
auuagaaauaauacaaagauggcgc

SEQ ID NO: 1220 - RNA, 25 nt, Artificial Sequence
  source: /note="Description of Artificial Sequence: Synthetic oligonucleotide"
uuagaaauaauacaaagauggcgca

SEQ ID NO: 1221 - RNA, 25 nt, Artificial Sequence
  source: /note="Description of Artificial Sequence: Synthetic oligonucleotide"
aagauggcgcagggaagaugaauug

SEQ ID NO: 1222 - RNA, 25 nt, Artificial Sequence
  source: /note="Description of Artificial Sequence: Synthetic oligonucleotide"
agauggcgcagggaagaugaauugu

SEQ ID NO: 1223 - RNA, 25 nt, Artificial Sequence
  source: /note="Description of Artificial Sequence: Synthetic oligonucleotide"
aagaugaauugugggagagccguca

SEQ ID NO: 1224 - RNA, 25 nt, Artificial Sequence
  source: /note="Description of Artificial Sequence: Synthetic oligonucleotide"
ggcaaaccccagcacuuaagcaaac

SEQ ID NO: 1225 - RNA, 25 nt, Artificial Sequence
  source: /note="Description of Artificial Sequence: Synthetic oligonucleotide"
aggcaaaccccagcacuuaagcaaa

SEQ ID NO: 1226 - RNA, 25 nt, Artificial Sequence
  source: /note="Description of Artificial Sequence: Synthetic oligonucleotide"
agcccaccaugucucgccgcaagca

SEQ ID NO: 1227 - RNA, 25 nt, Artificial Sequence
  source: /note="Description of Artificial Sequence: Synthetic oligonucleotide"
cucuggagucuccuucuuucuaacc

SEQ ID NO: 1228 - RNA, 25 nt, Artificial Sequence
  source: /note="Description of Artificial Sequence: Synthetic oligonucleotide"
aaggcacugaugaagauauuuucuc

SEQ ID NO: 1229 - RNA, 25 nt, Artificial Sequence
  source: /note="Description of Artificial Sequence: Synthetic oligonucleotide"
uuucuaauuuauuuuggaugucaaa

SEQ ID NO: 1230 - RNA, 25 nt, Artificial Sequence
  source: /note="Description of Artificial Sequence: Synthetic oligonucleotide"
ucuuuguauuauuucuaauuuauuu

SEQ ID NO: 1231 - RNA, 25 nt, Artificial Sequence
  source: /note="Description of Artificial Sequence: Synthetic oligonucleotide"
aaaaaagcuuaaaaaaaagccauga

SEQ ID NO: 1232 - RNA, 25 nt, Artificial Sequence
  source: /note="Description of Artificial Sequence: Synthetic oligonucleotide"
gggaguuuggcuucucaucugugca

SEQ ID NO: 1233 - RNA, 25 nt, Artificial Sequence
  source: /note="Description of Artificial Sequence: Synthetic oligonucleotide"
ucucaucugugcauggccucuaaac

SEQ ID NO: 1234 - RNA, 25 nt, Artificial Sequence
  source: /note="Description of Artificial Sequence: Synthetic oligonucleotide"
cucaucugugcauggccucuaaacu

SEQ ID NO: 1235 - RNA, 25 nt, Artificial Sequence
  source: /note="Description of Artificial Sequence: Synthetic oligonucleotide"
uggccucuaaacugggcagugacca

SEQ ID NO: 1236 - RNA, 25 nt, Artificial Sequence
  source: /note="Description of Artificial Sequence: Synthetic oligonucleotide"
ucuaaacugggcagugaccauggcc

SEQ ID NO: 1237 - RNA, 25 nt, Artificial Sequence
  source: /note="Description of Artificial Sequence: Synthetic oligonucleotide"
ccauggccuggucaccuccccacuc

SEQ ID NO: 1238 - RNA, 25 nt, Artificial Sequence
  source: /note="Description of Artificial Sequence: Synthetic oligonucleotide"
ccuggucaccuccccacucuggacc

SEQ ID NO: 1239 - RNA, 25 nt, Artificial Sequence
  source: /note="Description of Artificial Sequence: Synthetic oligonucleotide"
cuggucaccuccccacucuggaccu

SEQ ID NO: 1240 - RNA, 25 nt, Artificial Sequence
  source: /note="Description of Artificial Sequence: Synthetic oligonucleotide"
gaccuggguugccccucuguaaaca

SEQ ID NO: 1241 - RNA, 25 nt, Artificial Sequence
  source: /note="Description of Artificial Sequence: Synthetic oligonucleotide"
cuggguugccccucuguaaacaagg

SEQ ID NO: 1242 - RNA, 25 nt, Artificial Sequence
  source: /note="Description of Artificial Sequence: Synthetic oligonucleotide"
aaaucuuaugcaauuuuugccaaga

SEQ ID NO: 1243 - RNA, 25 nt, Artificial Sequence
  source: /note="Description of Artificial Sequence: Synthetic oligonucleotide"
aaucuuaugcaauuuuugccaagau

SEQ ID NO: 1244 - RNA, 25 nt, Artificial Sequence
  source: /note="Description of Artificial Sequence: Synthetic oligonucleotide"
ugcaauuuuugccaagaugggagua

SEQ ID NO: 1245 - RNA, 25 nt, Artificial Sequence
  source: /note="Description of Artificial Sequence: Synthetic oligonucleotide"
gcaauuuuugccaagaugggaguau

SEQ ID NO: 1246 - RNA, 25 nt, Artificial Sequence
  source: /note="Description of Artificial Sequence: Synthetic oligonucleotide"
caauuuuugccaagaugggaguaug

SEQ ID NO: 1247 - RNA, 25 nt, Artificial Sequence
  source: /note="Description of Artificial Sequence: Synthetic oligonucleotide"
agaugggaguauggggagagaagag

SEQ ID NO: 1248 - RNA, 25 nt, Artificial Sequence
  source: /note="Description of Artificial Sequence: Synthetic oligonucleotide"
gaguauggggagagaagaguggaaa

SEQ ID NO: 1249 - RNA, 25 nt, Artificial Sequence
  source: /note="Description of Artificial Sequence: Synthetic oligonucleotide"
agagcucagugagaugagauaucaa

SEQ ID NO: 1250 - RNA, 25 nt, Artificial Sequence
  source: /note="Description of Artificial Sequence: Synthetic oligonucleotide"
gagcucagugagaugagauaucaaa

SEQ ID NO: 1251 - RNA, 25 nt, Artificial Sequence
  source: /note="Description of Artificial Sequence: Synthetic oligonucleotide"
agcucagugagaugagauaucaaag

SEQ ID NO: 1252 - RNA, 25 nt, Artificial Sequence
  source: /note="Description of Artificial Sequence: Synthetic oligonucleotide"
ucauuccaucucccuaaucuccaau

SEQ ID NO: 1253 - RNA, 25 nt, Artificial Sequence
  source: /note="Description of Artificial Sequence: Synthetic oligonucleotide"
aaucuccaauuggcaaagccagacu

SEQ ID NO: 1254 - RNA, 25 nt, Artificial Sequence
  source: /note="Description of Artificial Sequence: Synthetic oligonucleotide"
aucuccaauuggcaaagccagacuu

SEQ ID NO: 1255 - RNA, 25 nt, Artificial Sequence
  source: /note="Description of Artificial Sequence: Synthetic oligonucleotide"
ucuccaauuggcaaagccagacuug

SEQ ID NO: 1256 - RNA, 25 nt, Artificial Sequence
  source: /note="Description of Artificial Sequence: Synthetic oligonucleotide"
aagccagacuuggggcaauacagac

SEQ ID NO: 1257 - RNA, 25 nt, Artificial Sequence
  source: /note="Description of Artificial Sequence: Synthetic oligonucleotide"
uaucaccaaauguucuuucuucagc

SEQ ID NO: 1258 - RNA, 25 nt, Artificial Sequence
  source: /note="Description of Artificial Sequence: Synthetic oligonucleotide"
cuuucuucagcuggaauuuaaaaua

SEQ ID NO: 1259 - RNA, 25 nt, Artificial Sequence
  source: /note="Description of Artificial Sequence: Synthetic oligonucleotide"
uaaaauauggacucauccguaaaau

SEQ ID NO: 1260 - RNA, 25 nt, Artificial Sequence
  source: /note="Description of Artificial Sequence: Synthetic oligonucleotide"
ggaauaauaauaguauaugcuucau

SEQ ID NO: 1261 - RNA, 25 nt, Artificial Sequence
  source: /note="Description of Artificial Sequence: Synthetic oligonucleotide"
gaauaauaauaguauaugcuucaua

SEQ ID NO: 1262 - RNA, 25 nt, Artificial Sequence
  source: /note="Description of Artificial Sequence: Synthetic oligonucleotide"
gcuugugaacuaaaaugcugccucc

SEQ ID NO: 1263 - RNA, 25 nt, Artificial Sequence
  source: /note="Description of Artificial Sequence: Synthetic oligonucleotide"
acaccucagcagaaacaaaguuauc

SEQ ID NO: 1264 - RNA, 25 nt, Artificial Sequence
  source: /note="Description of Artificial Sequence: Synthetic oligonucleotide"
caggcccuuuccccaauuccuaguu

SEQ ID NO: 1265 - RNA, 25 nt, Artificial Sequence
  source: /note="Description of Artificial Sequence: Synthetic oligonucleotide"
aggcccuuuccccaauuccuaguuu

SEQ ID NO: 1266 - RNA, 25 nt, Artificial Sequence
  source: /note="Description of Artificial Sequence: Synthetic oligonucleotide"
aauuccuaguuugggucagaagaaa

SEQ ID NO: 1267 - RNA, 25 nt, Artificial Sequence
  source: /note="Description of Artificial Sequence: Synthetic oligonucleotide"
auuccuaguuugggucagaagaaaa

SEQ ID NO: 1268 - RNA, 25 nt, Artificial Sequence
  source: /note="Description of Artificial Sequence: Synthetic oligonucleotide"
aguuugggucagaagaaaagggaaa

SEQ ID NO: 1269 - RNA, 25 nt, Artificial Sequence
  source: /note="Description of Artificial Sequence: Synthetic oligonucleotide"
guuugggucagaagaaaagggaaaa

SEQ ID NO: 1270 - RNA, 25 nt, Artificial Sequence
  source: /note="Description of Artificial Sequence: Synthetic oligonucleotide"
ggucagaagaaaagggaaaagggag

SEQ ID NO: 1271 - RNA, 25 nt, Artificial Sequence
  source: /note="Description of Artificial Sequence: Synthetic oligonucleotide"
agaaaagggaaaagggagaggaaaa

SEQ ID NO: 1272 - RNA, 25 nt, Artificial Sequence
  source: /note="Description of Artificial Sequence: Synthetic oligonucleotide"
ggaaaaaggaaaagaauaugacguc

SEQ ID NO: 1273 - RNA, 25 nt, Artificial Sequence
  source: /note="Description of Artificial Sequence: Synthetic oligonucleotide"
gaaaaaggaaaagaauaugacguca

SEQ ID NO: 1274 - RNA, 25 nt, Artificial Sequence
  source: /note="Description of Artificial Sequence: Synthetic oligonucleotide"
aaaaaggaaaagaauaugacgucag

SEQ ID NO: 1275 - RNA, 25 nt, Artificial Sequence
  source: /note="Description of Artificial Sequence: Synthetic oligonucleotide"
aaaaggaaaagaauaugacgucagg

SEQ ID NO: 1276 - RNA, 25 nt, Artificial Sequence
  source: /note="Description of Artificial Sequence: Synthetic oligonucleotide"
aggaaaagaauaugacgucaggggg

SEQ ID NO: 1277 - RNA, 25 nt, Artificial Sequence
  source: /note="Description of Artificial Sequence: Synthetic oligonucleotide"
ugacgucagggggaggcaagucagu

SEQ ID NO: 1278 - RNA, 25 nt, Artificial Sequence
  source: /note="Description of Artificial Sequence: Synthetic oligonucleotide"
gacgucagggggaggcaagucaguu

SEQ ID NO: 1279 - RNA, 25 nt, Artificial Sequence
  source: /note="Description of Artificial Sequence: Synthetic oligonucleotide"
ggaacacagauccuaacacaguagc

SEQ ID NO: 1280 - RNA, 25 nt, Artificial Sequence
  source: /note="Description of Artificial Sequence: Synthetic oligonucleotide"
ccuaacacaguagcugguaccugau

SEQ ID NO: 1281 - RNA, 25 nt, Artificial Sequence
  source: /note="Description of Artificial Sequence: Synthetic oligonucleotide"
guaccugauaggugccuauauguga

SEQ ID NO: 1282 - RNA, 25 nt, Artificial Sequence
  source: /note="Description of Artificial Sequence: Synthetic oligonucleotide"
cugauaggugccuauaugugaugga

SEQ ID NO: 1283 - RNA, 25 nt, Artificial Sequence
  source: /note="Description of Artificial Sequence: Synthetic oligonucleotide"
ugauaggugccuauaugugauggau

SEQ ID NO: 1284 - RNA, 25 nt, Artificial Sequence
  source: /note="Description of Artificial Sequence: Synthetic oligonucleotide"
uaggugccuauaugugauggauggg

SEQ ID NO: 1285 - RNA, 25 nt, Artificial Sequence
  source: /note="Description of Artificial Sequence: Synthetic oligonucleotide"
gguggacagcccgacagaugaaaaa

SEQ ID NO: 1286 - RNA, 25 nt, Artificial Sequence
  source: /note="Description of Artificial Sequence: Synthetic oligonucleotide"
gacagaugaaaaauggacaauuaug

SEQ ID NO: 1287 - RNA, 25 nt, Artificial Sequence
  source: /note="Description of Artificial Sequence: Synthetic oligonucleotide"
agaugaaaaauggacaauuaugagg

SEQ ID NO: 1288 - RNA, 25 nt, Artificial Sequence
  source: /note="Description of Artificial Sequence: Synthetic oligonucleotide"
gaugaaaaauggacaauuaugagga

SEQ ID NO: 1289 - RNA, 25 nt, Artificial Sequence
  source: /note="Description of Artificial Sequence: Synthetic oligonucleotide"
augaaaaauggacaauuaugaggag

SEQ ID NO: 1290 - RNA, 25 nt, Artificial Sequence
  source: /note="Description of Artificial Sequence: Synthetic oligonucleotide"
auuaugaggaggggagagugcagac

SEQ ID NO: 1291 - RNA, 25 nt, Artificial Sequence
  source: /note="Description of Artificial Sequence: Synthetic oligonucleotide"
uuaugaggaggggagagugcagaca

SEQ ID NO: 1292 - RNA, 25 nt, Artificial Sequence
  source: /note="Description of Artificial Sequence: Synthetic oligonucleotide"
uaugaggaggggagagugcagacag

SEQ ID NO: 1293 - RNA, 25 nt, Artificial Sequence
  source: /note="Description of Artificial Sequence: Synthetic oligonucleotide"
ggaagcuucaccuccuuuacaauuu

SEQ ID NO: 1294 - RNA, 25 nt, Artificial Sequence
  source: /note="Description of Artificial Sequence: Synthetic oligonucleotide"
gaagcuucaccuccuuuacaauuuu

SEQ ID NO: 1295 - RNA, 25 nt, Artificial Sequence
  source: /note="Description of Artificial Sequence: Synthetic oligonucleotide"
uccuuuacaauuuugggaguccaca

SEQ ID NO: 1296 - RNA, 25 nt, Artificial Sequence
  source: /note="Description of Artificial Sequence: Synthetic oligonucleotide"
uacaauuuugggaguccacacggca

SEQ ID NO: 1297 - RNA, 25 nt, Artificial Sequence
  source: /note="Description of Artificial Sequence: Synthetic oligonucleotide"
caucaccaagagagccuuccgaaag

SEQ ID NO: 1298 - RNA, 25 nt, Artificial Sequence
  source: /note="Description of Artificial Sequence: Synthetic oligonucleotide"
gagagccuuccgaaagaggcccccc

SEQ ID NO: 1299 - RNA, 25 nt, Artificial Sequence
  source: /note="Description of Artificial Sequence: Synthetic oligonucleotide"
agagccuuccgaaagaggccccccu

SEQ ID NO: 1300 - RNA, 25 nt, Artificial Sequence
  source: /note="Description of Artificial Sequence: Synthetic oligonucleotide"
uccgaaagaggccccccugggcaaa

SEQ ID NO: 1301 - RNA, 25 nt, Artificial Sequence
  source: /note="Description of Artificial Sequence: Synthetic oligonucleotide"
gccccccugggcaaacggccaccga

SEQ ID NO: 1302 - RNA, 25 nt, Artificial Sequence
  source: /note="Description of Artificial Sequence: Synthetic oligonucleotide"
ccugggcaaacggccaccgauggag

SEQ ID NO: 1303 - RNA, 25 nt, Artificial Sequence
  source: /note="Description of Artificial Sequence: Synthetic oligonucleotide"
ccacccacgcccccacccuaaucag

SEQ ID NO: 1304 - RNA, 25 nt, Artificial Sequence
  source: /note="Description of Artificial Sequence: Synthetic oligonucleotide"
cccuaaucagaggccaaacccuucc

SEQ ID NO: 1305 - RNA, 25 nt, Artificial Sequence
  source: /note="Description of Artificial Sequence: Synthetic oligonucleotide"
acuagcuucaaaguuguauugaccc

SEQ ID NO: 1306 - RNA, 25 nt, Artificial Sequence
  source: /note="Description of Artificial Sequence: Synthetic oligonucleotide"
aagaguagaugccauaucucuuuuc

SEQ ID NO: 1307 - RNA, 25 nt, Artificial Sequence
  source: /note="Description of Artificial Sequence: Synthetic oligonucleotide"
uuucuggccuauguuauuaccugua

SEQ ID NO: 1308 - RNA, 25 nt, Artificial Sequence
  source: /note="Description of Artificial Sequence: Synthetic oligonucleotide"
guuauuaccuguauggacuuugcac

SEQ ID NO: 1309 - RNA, 25 nt, Artificial Sequence
  source: /note="Description of Artificial Sequence: Synthetic oligonucleotide"
cuaucugcucuuacuuaugcacacc

SEQ ID NO: 1310 - RNA, 25 nt, Artificial Sequence
  source: /note="Description of Artificial Sequence: Synthetic oligonucleotide"
uaucugcucuuacuuaugcacaccu

SEQ ID NO: 1311 - RNA, 25 nt, Artificial Sequence
  source: /note="Description of Artificial Sequence: Synthetic oligonucleotide"
aucugcucuuacuuaugcacaccug

SEQ ID NO: 1312 - RNA, 25 nt, Artificial Sequence
  source: /note="Description of Artificial Sequence: Synthetic oligonucleotide"
ccugucuagcugccuuccuuaucac

SEQ ID NO: 1313 - RNA, 25 nt, Artificial Sequence
  source: /note="Description of Artificial Sequence: Synthetic oligonucleotide"
uuccuuaucacaggaauagcaccca

SEQ ID NO: 1314 - RNA, 25 nt, Artificial Sequence
  source: /note="Description of Artificial Sequence: Synthetic oligonucleotide"
gaguagaacccccuauaaacuaguc

SEQ ID NO: 1315 - RNA, 25 nt, Artificial Sequence
  source: /note="Description of Artificial Sequence: Synthetic oligonucleotide"
ccuauaaacuagucugguuugccca

SEQ ID NO: 1316 - RNA, 25 nt, Artificial Sequence
  source: /note="Description of Artificial Sequence: Synthetic oligonucleotide"
cuauaaacuagucugguuugcccau

SEQ ID NO: 1317 - RNA, 25 nt, Artificial Sequence
  source: /note="Description of Artificial Sequence: Synthetic oligonucleotide"
uauaaacuagucugguuugcccaug

SEQ ID NO: 1318 - RNA, 25 nt, Artificial Sequence
  source: /note="Description of Artificial Sequence: Synthetic oligonucleotide"
ucugguuugcccauggggcacaguc

SEQ ID NO: 1319 - RNA, 25 nt, Artificial Sequence
  source: /note="Description of Artificial Sequence: Synthetic oligonucleotide"
auggggcacagucaggcuguuuucc

SEQ ID NO: 1320 - RNA, 25 nt, Artificial Sequence
  source: /note="Description of Artificial Sequence: Synthetic oligonucleotide"
uggggcacagucaggcuguuuucca

SEQ ID NO: 1321 - RNA, 25 nt, Artificial Sequence
  source: /note="Description of Artificial Sequence: Synthetic oligonucleotide"
ggcacagucaggcuguuuuccaggg

SEQ ID NO: 1322 - RNA, 25 nt, Artificial Sequence
  source: /note="Description of Artificial Sequence: Synthetic oligonucleotide"
gcacagucaggcuguuuuccagggu

SEQ ID NO: 1323 - RNA, 25 nt, Artificial Sequence
  source: /note="Description of Artificial Sequence: Synthetic oligonucleotide"
cacagucaggcuguuuuccagggug

SEQ ID NO: 1324 - RNA, 25 nt, Artificial Sequence
  source: /note="Description of Artificial Sequence: Synthetic oligonucleotide"
acacacguauguguugugaucccug

SEQ ID NO: 1325 - RNA, 25 nt, Artificial Sequence
  source: /note="Description of Artificial Sequence: Synthetic oligonucleotide"
uugugaucccugugguuugagaguu

SEQ ID NO: 1326 - RNA, 25 nt, Artificial Sequence
  source: /note="Description of Artificial Sequence: Synthetic oligonucleotide"
ucccuaaaagucaaaauauucucaa

SEQ ID NO: 1327 - RNA, 25 nt, Artificial Sequence
  source: /note="Description of Artificial Sequence: Synthetic oligonucleotide"
cccuaaaagucaaaauauucucaau

SEQ ID NO: 1328 - RNA, 25 nt, Artificial Sequence
  source: /note="Description of Artificial Sequence: Synthetic oligonucleotide"
cccucaaucagcacauacacacaaa

SEQ ID NO: 1329 - RNA, 25 nt, Artificial Sequence
  source: /note="Description of Artificial Sequence: Synthetic oligonucleotide"
ucagcacauacacacaaaagguacc

SEQ ID NO: 1330 - RNA, 25 nt, Artificial Sequence
  source: /note="Description of Artificial Sequence: Synthetic oligonucleotide"
uguaauucuuuuccugcucaaagac

SEQ ID NO: 1331 - RNA, 25 nt, Artificial Sequence
  source: /note="Description of Artificial Sequence: Synthetic oligonucleotide"
ccccaaccaaaaacccuugccacca

SEQ ID NO: 1332 - RNA, 25 nt, Artificial Sequence
  source: /note="Description of Artificial Sequence: Synthetic oligonucleotide"
cccaaccaaaaacccuugccaccau

SEQ ID NO: 1333 - RNA, 25 nt, Artificial Sequence
  source: /note="Description of Artificial Sequence: Synthetic oligonucleotide"
aaaaacccuugccaccaugggagcc

SEQ ID NO: 1334 - RNA, 25 nt, Artificial Sequence
  source: /note="Description of Artificial Sequence: Synthetic oligonucleotide"
aaaacccuugccaccaugggagccu

SEQ ID NO: 1335 - RNA, 25 nt, Artificial Sequence
  source: /note="Description of Artificial Sequence: Synthetic oligonucleotide"
aaacccuugccaccaugggagccug

SEQ ID NO: 1336 - RNA, 25 nt, Artificial Sequence
  source: /note="Description of Artificial Sequence: Synthetic oligonucleotide"
ccaccaugggagccuggggcagaga

SEQ ID NO: 1337 - RNA, 25 nt, Artificial Sequence
  source: /note="Description of Artificial Sequence: Synthetic oligonucleotide"
cacagugaagucaaacuguaauucc

SEQ ID NO: 1338 - RNA, 25 nt, Artificial Sequence
  source: /note="Description of Artificial Sequence: Synthetic oligonucleotide"
ucaaacuguaauuccaggcucuaaa

SEQ ID NO: 1339 - RNA, 25 nt, Artificial Sequence
  source: /note="Description of Artificial Sequence: Synthetic oligonucleotide"
uuuuucugagagucucuaaauuaca

SEQ ID NO: 1340 - RNA, 25 nt, Artificial Sequence
  source: /note="Description of Artificial Sequence: Synthetic oligonucleotide"
uuuucugagagucucuaaauuacaa

SEQ ID NO: 1341 - RNA, 25 nt, Artificial Sequence
  source: /note="Description of Artificial Sequence: Synthetic oligonucleotide"
acaccuaagaaacauacugcagcuc

SEQ ID NO: 1342 - RNA, 25 nt, Artificial Sequence
  source: /note="Description of Artificial Sequence: Synthetic oligonucleotide"
aaagagaacaaacaaaccaaagaga

SEQ ID NO: 1343 - RNA, 25 nt, Artificial Sequence
  source: /note="Description of Artificial Sequence: Synthetic oligonucleotide"
aagagaacaaacaaaccaaagagaa

SEQ ID NO: 1344 - RNA, 25 nt, Artificial Sequence
  source: /note="Description of Artificial Sequence: Synthetic oligonucleotide"
aacaaaccaaagagaagggauccag

SEQ ID NO: 1345 - RNA, 25 nt, Artificial Sequence
  source: /note="Description of Artificial Sequence: Synthetic oligonucleotide"
uaugugaaaagucaauugauaauga

SEQ ID NO: 1346 - RNA, 25 nt, Artificial Sequence
  source: /note="Description of Artificial Sequence: Synthetic oligonucleotide"
aaagucaauugauaaugaaggcuuu

SEQ ID NO: 1347 - RNA, 25 nt, Artificial Sequence
  source: /note="Description of Artificial Sequence: Synthetic oligonucleotide"
uugauaaugaaggcuuuaggauaac

SEQ ID NO: 1348 - RNA, 25 nt, Artificial Sequence
  source: /note="Description of Artificial Sequence: Synthetic oligonucleotide"
auaaugaaggcuuuaggauaaccgg

SEQ ID NO: 1349 - RNA, 25 nt, Artificial Sequence
  source: /note="Description of Artificial Sequence: Synthetic oligonucleotide"
uaaugaaggcuuuaggauaaccgga

SEQ ID NO: 1350 - RNA, 25 nt, Artificial Sequence
  source: /note="Description of Artificial Sequence: Synthetic oligonucleotide"
aaugaaggcuuuaggauaaccggag

SEQ ID NO: 1351 - RNA, 25 nt, Artificial Sequence
  source: /note="Description of Artificial Sequence: Synthetic oligonucleotide"
augauugaaagcaaugcaccugugc

SEQ ID NO: 1352 - RNA, 25 nt, Artificial Sequence
  source: /note="Description of Artificial Sequence: Synthetic oligonucleotide"
gaaagcaaugcaccugugcaggaaa

SEQ ID NO: 1353 - RNA, 25 nt, Artificial Sequence
  source: /note="Description of Artificial Sequence: Synthetic oligonucleotide"
augcaccugugcaggaaauggauua

SEQ ID NO: 1354 - RNA, 25 nt, Artificial Sequence
  source: /note="Description of Artificial Sequence: Synthetic oligonucleotide"
ugugcaggaaauggauuacggaaac

SEQ ID NO: 1355 - RNA, 25 nt, Artificial Sequence
  source: /note="Description of Artificial Sequence: Synthetic oligonucleotide"
gugcaggaaauggauuacggaaaca

SEQ ID NO: 1356 - RNA, 25 nt, Artificial Sequence
  source: /note="Description of Artificial Sequence: Synthetic oligonucleotide"
ucaugaaaucccagaaaaccagaac

SEQ ID NO: 1357 - RNA, 25 nt, Artificial Sequence
  source: /note="Description of Artificial Sequence: Synthetic oligonucleotide"
caugaaaucccagaaaaccagaacc

SEQ ID NO: 1358 - RNA, 25 nt, Artificial Sequence
  source: /note="Description of Artificial Sequence: Synthetic oligonucleotide"
cagaaaaccagaaccgggaaaguuc

SEQ ID NO: 1359 - RNA, 25 nt, Artificial Sequence
  source: /note="Description of Artificial Sequence: Synthetic oligonucleotide"
ccagaaccgggaaaguucuggaagu

SEQ ID NO: 1360 - RNA, 25 nt, Artificial Sequence
  source: /note="Description of Artificial Sequence: Synthetic oligonucleotide"
gaaaaacaaaucaugacuuaagcaa

SEQ ID NO: 1361 - RNA, 25 nt, Artificial Sequence
  source: /note="Description of Artificial Sequence: Synthetic oligonucleotide"
cguuuacagaaugccuugucccacg

SEQ ID NO: 1362 - RNA, 25 nt, Artificial Sequence
  source: /note="Description of Artificial Sequence: Synthetic oligonucleotide"
aggccauggucacugcccaguuuag

SEQ ID NO: 1363 - RNA, 25 nt, Artificial Sequence
  source: /note="Description of Artificial Sequence: Synthetic oligonucleotide"
ccagaguggggaggugaccaggcca

SEQ ID NO: 1364 - RNA, 25 nt, Artificial Sequence
  source: /note="Description of Artificial Sequence: Synthetic oligonucleotide"
ccagguccagaguggggaggugacc

SEQ ID NO: 1365 - RNA, 25 nt, Artificial Sequence
  source: /note="Description of Artificial Sequence: Synthetic oligonucleotide"
ggggcaacccagguccagagugggg

SEQ ID NO: 1366 - RNA, 25 nt, Artificial Sequence
  source: /note="Description of Artificial Sequence: Synthetic oligonucleotide"
agaggggcaacccagguccagagug

SEQ ID NO: 1367 - RNA, 25 nt, Artificial Sequence
  source: /note="Description of Artificial Sequence: Synthetic oligonucleotide"
cagaggggcaacccagguccagagu

SEQ ID NO: 1368 - RNA, 25 nt, Artificial Sequence
  source: /note="Description of Artificial Sequence: Synthetic oligonucleotide"
acagaggggcaacccagguccagag

SEQ ID NO: 1369 - RNA, 25 nt, Artificial Sequence
  source: /note="Description of Artificial Sequence: Synthetic oligonucleotide"
cuccuuguuuacagaggggcaaccc

SEQ ID NO: 1370 - RNA, 25 nt, Artificial Sequence
  source: /note="Description of Artificial Sequence: Synthetic oligonucleotide"
uauuacaaccuccuuguuuacagag

SEQ ID NO: 1371 - RNA, 25 nt, Artificial Sequence
  source: /note="Description of Artificial Sequence: Synthetic oligonucleotide"
uuauuacaaccuccuuguuuacaga

SEQ ID NO: 1372 - RNA, 25 nt, Artificial Sequence
  source: /note="Description of Artificial Sequence: Synthetic oligonucleotide"
uuuauuacaaccuccuuguuuacag

SEQ ID NO: 1373 - RNA, 25 nt, Artificial Sequence
  source: /note="Description of Artificial Sequence: Synthetic oligonucleotide"
uaagauuuauaagacauuaggguau

SEQ ID NO: 1374 - RNA, 25 nt, Artificial Sequence
  source: /note="Description of Artificial Sequence: Synthetic oligonucleotide"
auugcauaagauuuauaagacauua

SEQ ID NO: 1375 - RNA, 25 nt, Artificial Sequence
  source: /note="Description of Artificial Sequence: Synthetic oligonucleotide"
aauugcauaagauuuauaagacauu

SEQ ID NO: 1376 - RNA, 25 nt, Artificial Sequence
  source: /note="Description of Artificial Sequence: Synthetic oligonucleotide"
cucuucucuccccauacucccaucu

SEQ ID NO: 1377 - RNA, 25 nt, Artificial Sequence
  source: /note="Description of Artificial Sequence: Synthetic oligonucleotide"
uugauaucucaucucacugagcucu

SEQ ID NO: 1378 - RNA, 25 nt, Artificial Sequence
  source: /note="Description of Artificial Sequence: Synthetic oligonucleotide"
uuugauaucucaucucacugagcuc

SEQ ID NO: 1379 - RNA, 25 nt, Artificial Sequence
  source: /note="Description of Artificial Sequence: Synthetic oligonucleotide"
cuuugccaauuggagauuagggaga

SEQ ID NO: 1380 - RNA, 25 nt, Artificial Sequence
  source: /note="Description of Artificial Sequence: Synthetic oligonucleotide"
gucuggcuuugccaauuggagauua

SEQ ID NO: 1381 - RNA, 25 nt, Artificial Sequence
  source: /note="Description of Artificial Sequence: Synthetic oligonucleotide"
agucuggcuuugccaauuggagauu

SEQ ID NO: 1382 - RNA, 25 nt, Artificial Sequence
  source: /note="Description of Artificial Sequence: Synthetic oligonucleotide"
uugccccaagucuggcuuugccaau

SEQ ID NO: 1383 - RNA, 25 nt, Artificial Sequence
  source: /note="Description of Artificial Sequence: Synthetic oligonucleotide"
gaaccagucuguauugccccaaguc

SEQ ID NO: 1384 - RNA, 25 nt, Artificial Sequence
  source: /note="Description of Artificial Sequence: Synthetic oligonucleotide"
ggugauaaaucauuaggaaugagcu

SEQ ID NO: 1385 - RNA, 25 nt, Artificial Sequence
  source: /note="Description of Artificial Sequence: Synthetic oligonucleotide"
aaagaacauuuggugauaaaucauu

SEQ ID NO: 1386 - RNA, 25 nt, Artificial Sequence
  source: /note="Description of Artificial Sequence: Synthetic oligonucleotide"
aaauuccagcugaagaaagaacauu

SEQ ID NO: 1387 - RNA, 25 nt, Artificial Sequence
  source: /note="Description of Artificial Sequence: Synthetic oligonucleotide"
auauacuauuauuauuccuauuuua

SEQ ID NO: 1388 - RNA, 25 nt, Artificial Sequence
  source: /note="Description of Artificial Sequence: Synthetic oligonucleotide"
aagcucggagcacuuacucugcucu

SEQ ID NO: 1389 - RNA, 25 nt, Artificial Sequence
  source: /note="Description of Artificial Sequence: Synthetic oligonucleotide"
gaggcagcauuuuaguucacaagcu

SEQ ID NO: 1390 - RNA, 25 nt, Artificial Sequence
  source: /note="Description of Artificial Sequence: Synthetic oligonucleotide"
ugagguguaacuaauaaauaccagg

SEQ ID NO: 1391 - RNA, 25 nt, Artificial Sequence
  source: /note="Description of Artificial Sequence: Synthetic oligonucleotide"
ugcugagguguaacuaauaaauacc

SEQ ID NO: 1392 - RNA, 25 nt, Artificial Sequence
  source: /note="Description of Artificial Sequence: Synthetic oligonucleotide"
gggccugauaacuuuguuucugcug

SEQ ID NO: 1393 - RNA, 25 nt, Artificial Sequence
  source: /note="Description of Artificial Sequence: Synthetic oligonucleotide"
ugacccaaacuaggaauuggggaaa

SEQ ID NO: 1394 - RNA, 25 nt, Artificial Sequence
  source: /note="Description of Artificial Sequence: Synthetic oligonucleotide"
cugacccaaacuaggaauuggggaa

SEQ ID NO: 1395 - RNA, 25 nt, Artificial Sequence
  source: /note="Description of Artificial Sequence: Synthetic oligonucleotide"
uucuucugacccaaacuaggaauug

SEQ ID NO: 1396 - RNA, 25 nt, Artificial Sequence
  source: /note="Description of Artificial Sequence: Synthetic oligonucleotide"
uuucuucugacccaaacuaggaauu

SEQ ID NO: 1397 - RNA, 25 nt, Artificial Sequence
  source: /note="Description of Artificial Sequence: Synthetic oligonucleotide"
uuuucuucugacccaaacuaggaau

SEQ ID NO: 1398 - RNA, 25 nt, Artificial Sequence
  source: /note="Description of Artificial Sequence: Synthetic oligonucleotide"
uuucccuuuucuucugacccaaacu

SEQ ID NO: 1399 - RNA, 25 nt, Artificial Sequence
  source: /note="Description of Artificial Sequence: Synthetic oligonucleotide"
ccuaucagguaccagcuacuguguu

SEQ ID NO: 1400 - RNA, 25 nt, Artificial Sequence
  source: /note="Description of Artificial Sequence: Synthetic oligonucleotide"
cauccaucacauauaggcaccuauc

SEQ ID NO: 1401 - RNA, 25 nt, Artificial Sequence
  source: /note="Description of Artificial Sequence: Synthetic oligonucleotide"
ggcuguccacccauccaucacauau

SEQ ID NO: 1402 - RNA, 25 nt, Artificial Sequence
  source: /note="Description of Artificial Sequence: Synthetic oligonucleotide"
cauaauuguccauuuuucaucuguc

SEQ ID NO: 1403 - RNA, 25 nt, Artificial Sequence
  source: /note="Description of Artificial Sequence: Synthetic oligonucleotide"
ucauaauuguccauuuuucaucugu

SEQ ID NO: 1404 - RNA, 25 nt, Artificial Sequence
  source: /note="Description of Artificial Sequence: Synthetic oligonucleotide"
guguggacucccaaaauuguaaagg

SEQ ID NO: 1405 - RNA, 25 nt, Artificial Sequence
  source: /note="Description of Artificial Sequence: Synthetic oligonucleotide"
gccguguggacucccaaaauuguaa

SEQ ID NO: 1406 - RNA, 25 nt, Artificial Sequence
  source: /note="Description of Artificial Sequence: Synthetic oligonucleotide"
gaaauaauuuguaugccaugccgug

SEQ ID NO: 1407 - RNA, 25 nt, Artificial Sequence
  source: /note="Description of Artificial Sequence: Synthetic oligonucleotide"
ggagaauuggauuuuauuucucaau

SEQ ID NO: 1408 - RNA, 25 nt, Artificial Sequence
  source: /note="Description of Artificial Sequence: Synthetic oligonucleotide"
uggagaauuggauuuuauuucucaa

SEQ ID NO: 1409 - RNA, 25 nt, Artificial Sequence
  source: /note="Description of Artificial Sequence: Synthetic oligonucleotide"
gaaggcucucuuggugauggagaau

SEQ ID NO: 1410 - RNA, 25 nt, Artificial Sequence
  source: /note="Description of Artificial Sequence: Synthetic oligonucleotide"
cucuuucggaaggcucucuugguga

SEQ ID NO: 1411 - RNA, 25 nt, Artificial Sequence
  source: /note="Description of Artificial Sequence: Synthetic oligonucleotide"
gggggccucuuucggaaggcucucu

SEQ ID NO: 1412 - RNA, 25 nt, Artificial Sequence
  source: /note="Description of Artificial Sequence: Synthetic oligonucleotide"
uuugcccaggggggccucuuucgga

SEQ ID NO: 1413 - RNA, 25 nt, Artificial Sequence
  source: /note="Description of Artificial Sequence: Synthetic oligonucleotide"
gccguuugcccaggggggccucuuu

SEQ ID NO: 1414 - RNA, 25 nt, Artificial Sequence
  source: /note="Description of Artificial Sequence: Synthetic oligonucleotide"
uccaucgguggccguuugcccaggg

SEQ ID NO: 1415 - RNA, 25 nt, Artificial Sequence
  source: /note="Description of Artificial Sequence: Synthetic oligonucleotide"
cuccaucgguggccguuugcccagg

SEQ ID NO: 1416 - RNA, 25 nt, Artificial Sequence
  source: /note="Description of Artificial Sequence: Synthetic oligonucleotide"
ucuccaucgguggccguuugcccag

SEQ ID NO: 1417 - RNA, 25 nt, Artificial Sequence
  source: /note="Description of Artificial Sequence: Synthetic oligonucleotide"
cucuccaucgguggccguuugccca

SEQ ID NO: 1418 - RNA, 25 nt, Artificial Sequence
  source: /note="Description of Artificial Sequence: Synthetic oligonucleotide"
ccucuccaucgguggccguuugccc

SEQ ID NO: 1419 - RNA, 25 nt, Artificial Sequence
  source: /note="Description of Artificial Sequence: Synthetic oligonucleotide"
gaggacuggcagaccucuccaucgg

SEQ ID NO: 1420 - RNA, 25 nt, Artificial Sequence
  source: /note="Description of Artificial Sequence: Synthetic oligonucleotide"
gaagaggacuggcagaccucuccau

SEQ ID NO: 1421 - RNA, 25 nt, Artificial Sequence
  source: /note="Description of Artificial Sequence: Synthetic oligonucleotide"
gggcgugggugggguagaagaggac

SEQ ID NO: 1422 - RNA, 25 nt, Artificial Sequence
  source: /note="Description of Artificial Sequence: Synthetic oligonucleotide"
ggugggggcgugggugggguagaag

SEQ ID NO: 1423 - RNA, 25 nt, Artificial Sequence
  source: /note="Description of Artificial Sequence: Synthetic oligonucleotide"
ucugauuagggugggggcgugggug

SEQ ID NO: 1424 - RNA, 25 nt, Artificial Sequence
  source: /note="Description of Artificial Sequence: Synthetic oligonucleotide"
cucugauuagggugggggcgugggu

SEQ ID NO: 1425 - RNA, 25 nt, Artificial Sequence
  source: /note="Description of Artificial Sequence: Synthetic oligonucleotide"
ccucugauuagggugggggcguggg

SEQ ID NO: 1426 - RNA, 25 nt, Artificial Sequence
  source: /note="Description of Artificial Sequence: Synthetic oligonucleotide"
uggccucugauuagggugggggcgu

SEQ ID NO: 1427 - RNA, 25 nt, Artificial Sequence
  source: /note="Description of Artificial Sequence: Synthetic oligonucleotide"
uuggccucugauuagggugggggcg

SEQ ID NO: 1428 - RNA, 25 nt, Artificial Sequence
  source: /note="Description of Artificial Sequence: Synthetic oligonucleotide"
aggguuuggccucugauuagggugg

SEQ ID NO: 1429 - RNA, 25 nt, Artificial Sequence
  source: /note="Description of Artificial Sequence: Synthetic oligonucleotide"
aaggguuuggccucugauuagggug

SEQ ID NO: 1430 - RNA, 25 nt, Artificial Sequence
  source: /note="Description of Artificial Sequence: Synthetic oligonucleotide"
gaaggguuuggccucugauuagggu

SEQ ID NO: 1431 - RNA, 25 nt, Artificial Sequence
  source: /note="Description of Artificial Sequence: Synthetic oligonucleotide"
ggaaggguuuggccucugauuaggg

SEQ ID NO: 1432 - RNA, 25 nt, Artificial Sequence
  source: /note="Description of Artificial Sequence: Synthetic oligonucleotide"
ccaggaaggguuuggccucugauua

SEQ ID NO: 1433 - RNA, 25 nt, Artificial Sequence
  source: /note="Description of Artificial Sequence: Synthetic oligonucleotide"
uccaggaaggguuuggccucugauu

SEQ ID NO: 1434 - RNA, 25 nt, Artificial Sequence
  source: /note="Description of Artificial Sequence: Synthetic oligonucleotide"
uuuaucacaggcuccaggaaggguu

SEQ ID NO: 1435 - RNA, 25 nt, Artificial Sequence
  source: /note="Description of Artificial Sequence: Synthetic oligonucleotide"
uugcuuuuaucacaggcuccaggaa

SEQ ID NO: 1436 - RNA, 25 nt, Artificial Sequence
  source: /note="Description of Artificial Sequence: Synthetic oligonucleotide"
guugcuuuuaucacaggcuccagga

SEQ ID NO: 1437 - RNA, 25 nt, Artificial Sequence
  source: /note="Description of Artificial Sequence: Synthetic oligonucleotide"
aacaguugcuuuuaucacaggcucc

SEQ ID NO: 1438 - RNA, 25 nt, Artificial Sequence
  source: /note="Description of Artificial Sequence: Synthetic oligonucleotide"
gcaagcuaacaguugcuuuuaucac

SEQ ID NO: 1439 - RNA, 25 nt, Artificial Sequence
  source: /note="Description of Artificial Sequence: Synthetic oligonucleotide"
aucuacucuuagacauaacacacca

SEQ ID NO: 1440 - RNA, 25 nt, Artificial Sequence
  source: /note="Description of Artificial Sequence: Synthetic oligonucleotide"
caucuacucuuagacauaacacacc

SEQ ID NO: 1441 - RNA, 25 nt, Artificial Sequence
  source: /note="Description of Artificial Sequence: Synthetic oligonucleotide"
aauaacauaggccagaaaagagaua

SEQ ID NO: 1442 - RNA, 25 nt, Artificial Sequence
  source: /note="Description of Artificial Sequence: Synthetic oligonucleotide"
gcaaaguccauacagguaauaacau

SEQ ID NO: 1443 - RNA, 25 nt, Artificial Sequence
  source: /note="Description of Artificial Sequence: Synthetic oligonucleotide"
gcugauuccagugcaaaguccauac

SEQ ID NO: 1444 - RNA, 25 nt, Artificial Sequence
  source: /note="Description of Artificial Sequence: Synthetic oligonucleotide"
cgauacagggcuggcucuaugcccc

SEQ ID NO: 1445 - RNA, 25 nt, Artificial Sequence
  source: /note="Description of Artificial Sequence: Synthetic oligonucleotide"
agauggcugaaaagcgauacagggc

SEQ ID NO: 1446 - RNA, 25 nt, Artificial Sequence
  source: /note="Description of Artificial Sequence: Synthetic oligonucleotide"
agugagauggcugaaaagcgauaca

SEQ ID NO: 1447 - RNA, 25 nt, Artificial Sequence
  source: /note="Description of Artificial Sequence: Synthetic oligonucleotide"
uagugagauggcugaaaagcgauac

SEQ ID NO: 1448 - RNA, 25 nt, Artificial Sequence
  source: /note="Description of Artificial Sequence: Synthetic oligonucleotide"
gacuugggaguuaucuguagugaga

SEQ ID NO: 1449 - RNA, 25 nt, Artificial Sequence
  source: /note="Description of Artificial Sequence: Synthetic oligonucleotide"
uaaggaaggcagcuagacaggacuu

SEQ ID NO: 1450 - RNA, 25 nt, Artificial Sequence
  source: /note="Description of Artificial Sequence: Synthetic oligonucleotide"
auaaggaaggcagcuagacaggacu

SEQ ID NO: 1451 - RNA, 25 nt, Artificial Sequence
  source: /note="Description of Artificial Sequence: Synthetic oligonucleotide"
ccugugauaaggaaggcagcuagac

SEQ ID NO: 1452 - RNA, 25 nt, Artificial Sequence
  source: /note="Description of Artificial Sequence: Synthetic oligonucleotide"
uugggugcuauuccugugauaagga

SEQ ID NO: 1453 - RNA, 25 nt, Artificial Sequence
  source: /note="Description of Artificial Sequence: Synthetic oligonucleotide"
gaccuugggugcuauuccugugaua

SEQ ID NO: 1454 - RNA, 25 nt, Artificial Sequence
  source: /note="Description of Artificial Sequence: Synthetic oligonucleotide"
cuacucugagguacugauggaccuu

SEQ ID NO: 1455 - RNA, 25 nt, Artificial Sequence
  source: /note="Description of Artificial Sequence: Synthetic oligonucleotide"
ucuacucugagguacugauggaccu

SEQ ID NO: 1456 - RNA, 25 nt, Artificial Sequence
  source: /note="Description of Artificial Sequence: Synthetic oligonucleotide"
aggggguucuacucugagguacuga

SEQ ID NO: 1457 - RNA, 25 nt, Artificial Sequence
  source: /note="Description of Artificial Sequence: Synthetic oligonucleotide"
cuaguuuauaggggguucuacucug

SEQ ID NO: 1458 - RNA, 25 nt, Artificial Sequence
  source: /note="Description of Artificial Sequence: Synthetic oligonucleotide"
ugggcaaaccagacuaguuuauagg

SEQ ID NO: 1459 - RNA, 25 nt, Artificial Sequence
  source: /note="Description of Artificial Sequence: Synthetic oligonucleotide"
augggcaaaccagacuaguuuauag

SEQ ID NO: 1460 - RNA, 25 nt, Artificial Sequence
  source: /note="Description of Artificial Sequence: Synthetic oligonucleotide"
caugggcaaaccagacuaguuuaua

SEQ ID NO: 1461 - RNA, 25 nt, Artificial Sequence
  source: /note="Description of Artificial Sequence: Synthetic oligonucleotide"
ccaugggcaaaccagacuaguuuau

SEQ ID NO: 1462 - RNA, 25 nt, Artificial Sequence
  source: /note="Description of Artificial Sequence: Synthetic oligonucleotide"
ggaaaacagccugacugugccccau

SEQ ID NO: 1463 - RNA, 25 nt, Artificial Sequence
  source: /note="Description of Artificial Sequence: Synthetic oligonucleotide"
uggaaaacagccugacugugcccca

SEQ ID NO: 1464 - RNA, 25 nt, Artificial Sequence
  source: /note="Description of Artificial Sequence: Synthetic oligonucleotide"
ggcagagaaugucugcaccccaccc

SEQ ID NO: 1465 - RNA, 25 nt, Artificial Sequence
  source: /note="Description of Artificial Sequence: Synthetic oligonucleotide"
ugacguuauauguaagcaucacaac

SEQ ID NO: 1466 - RNA, 25 nt, Artificial Sequence
  source: /note="Description of Artificial Sequence: Synthetic oligonucleotide"
ggaagcuccaaacucucaaaccaca

SEQ ID NO: 1467 - RNA, 25 nt, Artificial Sequence
  source: /note="Description of Artificial Sequence: Synthetic oligonucleotide"
gggaagcuccaaacucucaaaccac

SEQ ID NO: 1468 - RNA, 25 nt, Artificial Sequence
  source: /note="Description of Artificial Sequence: Synthetic oligonucleotide"
cccauugagaauauuuugacuuuua

SEQ ID NO: 1469 - RNA, 25 nt, Artificial Sequence
  source: /note="Description of Artificial Sequence: Synthetic oligonucleotide"
gcccauugagaauauuuugacuuuu

SEQ ID NO: 1470 - RNA, 25 nt, Artificial Sequence
  source: /note="Description of Artificial Sequence: Synthetic oligonucleotide"
ccuuuuguguguaugugcugauuga

SEQ ID NO: 1471 - RNA, 25 nt, Artificial Sequence
  source: /note="Description of Artificial Sequence: Synthetic oligonucleotide"
accuuuuguguguaugugcugauug

SEQ ID NO: 1472 - RNA, 25 nt, Artificial Sequence
  source: /note="Description of Artificial Sequence: Synthetic oligonucleotide"
agcaggaaaagaauuacaguuuucc

SEQ ID NO: 1473 - RNA, 25 nt, Artificial Sequence
  source: /note="Description of Artificial Sequence: Synthetic oligonucleotide"
gguauugaauugccugucuuugagc

SEQ ID NO: 1474 - RNA, 25 nt, Artificial Sequence
  source: /note="Description of Artificial Sequence: Synthetic oligonucleotide"
ggcaaggguuuuugguugggggaag

SEQ ID NO: 1475 - RNA, 25 nt, Artificial Sequence
  source: /note="Description of Artificial Sequence: Synthetic oligonucleotide"
uggcaaggguuuuugguugggggaa

SEQ ID NO: 1476 - RNA, 25 nt, Artificial Sequence
  source: /note="Description of Artificial Sequence: Synthetic oligonucleotide"
guggcaaggguuuuugguuggggga

SEQ ID NO: 1477 - RNA, 25 nt, Artificial Sequence
  source: /note="Description of Artificial Sequence: Synthetic oligonucleotide"
caugguggcaaggguuuuugguugg

SEQ ID NO: 1478 - RNA, 25 nt, Artificial Sequence
  source: /note="Description of Artificial Sequence: Synthetic oligonucleotide"
ccaugguggcaaggguuuuugguug

SEQ ID NO: 1479 - RNA, 25 nt, Artificial Sequence
  source: /note="Description of Artificial Sequence: Synthetic oligonucleotide"
cccaugguggcaaggguuuuugguu

SEQ ID NO: 1480 - RNA, 25 nt, Artificial Sequence
  source: /note="Description of Artificial Sequence: Synthetic oligonucleotide"
ucccaugguggcaaggguuuuuggu

SEQ ID NO: 1481 - RNA, 25 nt, Artificial Sequence
  source: /note="Description of Artificial Sequence: Synthetic oligonucleotide"
aggcucccaugguggcaaggguuuu

SEQ ID NO: 1482 - RNA, 25 nt, Artificial Sequence
  source: /note="Description of Artificial Sequence: Synthetic oligonucleotide"
cugccccaggcucccaugguggcaa

SEQ ID NO: 1483 - RNA, 25 nt, Artificial Sequence
  source: /note="Description of Artificial Sequence: Synthetic oligonucleotide"
ucugccccaggcucccaugguggca

SEQ ID NO: 1484 - RNA, 25 nt, Artificial Sequence
  source: /note="Description of Artificial Sequence: Synthetic oligonucleotide"
ccuucucugccccaggcucccaugg

SEQ ID NO: 1485 - RNA, 25 nt, Artificial Sequence
  source: /note="Description of Artificial Sequence: Synthetic oligonucleotide"
gugccuucucugccccaggcuccca

SEQ ID NO: 1486 - RNA, 25 nt, Artificial Sequence
  source: /note="Description of Artificial Sequence: Synthetic oligonucleotide"
gacuucacugugccuucucugcccc

SEQ ID NO: 1487 - RNA, 25 nt, Artificial Sequence
  source: /note="Description of Artificial Sequence: Synthetic oligonucleotide"
aaaaaugacagcaccauuuagagcc

SEQ ID NO: 1488 - RNA, 25 nt, Artificial Sequence
  source: /note="Description of Artificial Sequence: Synthetic oligonucleotide"
uuuccagagcugcaguauguuucuu

SEQ ID NO: 1489 - RNA, 25 nt, Artificial Sequence
  source: /note="Description of Artificial Sequence: Synthetic oligonucleotide"
gggugaccucuggaucccuucucuu

SEQ ID NO: 1490 - RNA, 25 nt, Artificial Sequence
  source: /note="Description of Artificial Sequence: Synthetic oligonucleotide"
acuuuucacauaugagggugaccuc

SEQ ID NO: 1491 - RNA, 25 nt, Artificial Sequence
  source: /note="Description of Artificial Sequence: Synthetic oligonucleotide"
uuaucaauugacuuuucacauauga

SEQ ID NO: 1492 - RNA, 25 nt, Artificial Sequence
  source: /note="Description of Artificial Sequence: Synthetic oligonucleotide"
auuaucaauugacuuuucacauaug

SEQ ID NO: 1493 - RNA, 25 nt, Artificial Sequence
  source: /note="Description of Artificial Sequence: Synthetic oligonucleotide"
gcauugcuuucaaucaucuccccuc

SEQ ID NO: 1494 - RNA, 25 nt, Artificial Sequence
  source: /note="Description of Artificial Sequence: Synthetic oligonucleotide"
uguuuccguaauccauuuccugcac

SEQ ID NO: 1495 - RNA, 25 nt, Artificial Sequence
  source: /note="Description of Artificial Sequence: Synthetic oligonucleotide"
agaacuuucccgguucugguuuucu

SEQ ID NO: 1496 - RNA, 25 nt, Artificial Sequence
  source: /note="Description of Artificial Sequence: Synthetic oligonucleotide"
cagaacuuucccgguucugguuuuc

SEQ ID NO: 1497 - RNA, 25 nt, Artificial Sequence
  source: /note="Description of Artificial Sequence: Synthetic oligonucleotide"
ccgacuuccagaacuuucccgguuc

SEQ ID NO: 1498 - RNA, 25 nt, Artificial Sequence
  source: /note="Description of Artificial Sequence: Synthetic oligonucleotide"
guuuuuccgacuuccagaacuuucc

SEQ ID NO: 1499 - RNA, 25 nt, Artificial Sequence
  source: /note="Description of Artificial Sequence: Synthetic oligonucleotide"
gacaaggcauucuguaaacguguau

SEQ ID NO: 1500 - RNA, 20 nt, Artificial Sequence
  source: /note="Description of Artificial Sequence: Synthetic oligonucleotide"
uaucaagcauccagcauuug

SEQ ID NO: 1501 - RNA, 20 nt, Artificial Sequence
  source: /note="Description of Artificial Sequence: Synthetic oligonucleotide"
uaucuaaaaauguaauugcu

SEQ ID NO: 1502 - RNA, 20 nt, Artificial Sequence
  source: /note="Description of Artificial Sequence: Synthetic oligonucleotide"
agcauuucuauacaugucuu

SEQ ID NO: 1503 - RNA, 20 nt, Artificial Sequence
  source: /note="Description of Artificial Sequence: Synthetic oligonucleotide"
uaaucauaaaaaccucaaac

SEQ ID NO: 1504 - RNA, 20 nt, Artificial Sequence
  source: /note="Description of Artificial Sequence: Synthetic oligonucleotide"
uuuaaguggcuaccgguuug

SEQ ID NO: 1505 - RNA, 20 nt, Artificial Sequence
  source: /note="Description of Artificial Sequence: Synthetic oligonucleotide"
guaagcauuuaaguggcuac

SEQ ID NO: 1506 - RNA, 20 nt, Artificial Sequence
  source: /note="Description of Artificial Sequence: Synthetic oligonucleotide"
acuguugguaagcauuuaag

SEQ ID NO: 1507 - RNA, 20 nt, Artificial Sequence
  source: /note="Description of Artificial Sequence: Synthetic oligonucleotide"
uaauuuaucaauucuacugu

SEQ ID NO: 1508 - RNA, 20 nt, Artificial Sequence
  source: /note="Description of Artificial Sequence: Synthetic oligonucleotide"
acaguagaauugauaaauua

SEQ ID NO: 1509 - RNA, 20 nt, Artificial Sequence
  source: /note="Description of Artificial Sequence: Synthetic oligonucleotide"
caaaugcauuuuacagcauu

SEQ ID NO: 1510 - RNA, 20 nt, Artificial Sequence
  source: /note="Description of Artificial Sequence: Synthetic oligonucleotide"
gguugauuaaaaguaaccag

SEQ ID NO: 1511 - RNA, 20 nt, Artificial Sequence
  source: /note="Description of Artificial Sequence: Synthetic oligonucleotide"
auauaguuugaacucaccuc

SEQ ID NO: 1512 - RNA, 20 nt, Artificial Sequence
  source: /note="Description of Artificial Sequence: Synthetic oligonucleotide"
uuuauuuguauauagaaaga

SEQ ID NO: 1513 - RNA, 20 nt, Artificial Sequence
  source: /note="Description of Artificial Sequence: Synthetic oligonucleotide"
ugccugagauucugaucaca

SEQ ID NO: 1514 - RNA, 20 nt, Artificial Sequence
  source: /note="Description of Artificial Sequence: Synthetic oligonucleotide"
gccugagauucugaucacaa

SEQ ID NO: 1515 - RNA, 20 nt, Artificial Sequence
  source: /note="Description of Artificial Sequence: Synthetic oligonucleotide"
ccugagauucugaucacaag

SEQ ID NO: 1516 - RNA, 20 nt, Artificial Sequence
  source: /note="Description of Artificial Sequence: Synthetic oligonucleotide"
ccccuugugaucagaaucuc

SEQ ID NO: 1517 - RNA, 20 nt, Artificial Sequence
  source: /note="Description of Artificial Sequence: Synthetic oligonucleotide"
aaggggaaauguuauaaaau

SEQ ID NO: 1518 - RNA, 20 nt, Artificial Sequence
  source: /note="Description of Artificial Sequence: Synthetic oligonucleotide"
aggggaaauguuauaaaaua

SEQ ID NO: 1519 - RNA, 20 nt, Artificial Sequence
  source: /note="Description of Artificial Sequence: Synthetic oligonucleotide"
uguuauaaaauaggguagag

SEQ ID NO: 1520 - RNA, 20 nt, Artificial Sequence
  source: /note="Description of Artificial Sequence: Synthetic oligonucleotide"
caaaguuuaaaggucauuca

SEQ ID NO: 1521 - RNA, 20 nt, Artificial Sequence
  source: /note="Description of Artificial Sequence: Synthetic oligonucleotide"
uaacuuguaacaaaguuuaa

SEQ ID NO: 1522 - RNA, 20 nt, Artificial Sequence
  source: /note="Description of Artificial Sequence: Synthetic oligonucleotide"
caaguuauuuuucuguaacc

SEQ ID NO: 1523 - RNA, 20 nt, Artificial Sequence
  source: /note="Description of Artificial Sequence: Synthetic oligonucleotide"
aauaucuuucguuggcuucc

SEQ ID NO: 1524 - RNA, 20 nt, Artificial Sequence
  source: /note="Description of Artificial Sequence: Synthetic oligonucleotide"
aauuauucaauaucuuucgu

SEQ ID NO: 1525 - RNA, 20 nt, Artificial Sequence
  source: /note="Description of Artificial Sequence: Synthetic oligonucleotide"
gauauugaauaauucaagaa

SEQ ID NO: 1526 - RNA, 20 nt, Artificial Sequence
  source: /note="Description of Artificial Sequence: Synthetic oligonucleotide"
auugaauaauucaagaaagg

SEQ ID NO: 1527 - RNA, 20 nt, Artificial Sequence
  source: /note="Description of Artificial Sequence: Synthetic oligonucleotide"
gaauaauucaagaaaggugg

SEQ ID NO: 1528 - RNA, 20 nt, Artificial Sequence
  source: /note="Description of Artificial Sequence: Synthetic oligonucleotide"
auucaagaaaggugguggca

SEQ ID NO: 1529 - RNA, 20 nt, Artificial Sequence
  source: /note="Description of Artificial Sequence: Synthetic oligonucleotide"
uauuuuagaaguagagaaaa

SEQ ID NO: 1530 - RNA, 20 nt, Artificial Sequence
  source: /note="Description of Artificial Sequence: Synthetic oligonucleotide"
auuuuagaaguagagaaaau

SEQ ID NO: 1531 - RNA, 20 nt, Artificial Sequence
  source: /note="Description of Artificial Sequence: Synthetic oligonucleotide"
gaaaaugggagacaaauagc

SEQ ID NO: 1532 - RNA, 20 nt, Artificial Sequence
  source: /note="Description of Artificial Sequence: Synthetic oligonucleotide"
aaaaugggagacaaauagcu

SEQ ID NO: 1533 - RNA, 20 nt, Artificial Sequence
  source: /note="Description of Artificial Sequence: Synthetic oligonucleotide"
agcugggcuucuguugcagu

SEQ ID NO: 1534 - RNA, 20 nt, Artificial Sequence
  source: /note="Description of Artificial Sequence: Synthetic oligonucleotide"
gcugggcuucuguugcagua

SEQ ID NO: 1535 - RNA, 20 nt, Artificial Sequence
  source: /note="Description of Artificial Sequence: Synthetic oligonucleotide"
gccauuucuauuaucagacu

SEQ ID NO: 1536 - RNA, 20 nt, Artificial Sequence
  source: /note="Description of Artificial Sequence: Synthetic oligonucleotide"
uccaagucugauaauagaaa

SEQ ID NO: 1537 - RNA, 20 nt, Artificial Sequence
  source: /note="Description of Artificial Sequence: Synthetic oligonucleotide"
uuaucagacuuggaccauga

SEQ ID NO: 1538 - RNA, 20 nt, Artificial Sequence
  source: /note="Description of Artificial Sequence: Synthetic oligonucleotide"
cacgacugacaucaccguca

SEQ ID NO: 1539 - RNA, 20 nt, Artificial Sequence
  source: /note="Description of Artificial Sequence: Synthetic oligonucleotide"
ucagucgugaacacaagaau

SEQ ID NO: 1540 - RNA, 20 nt, Artificial Sequence
  source: /note="Description of Artificial Sequence: Synthetic oligonucleotide"
cagucgugaacacaagaaua

SEQ ID NO: 1541 - RNA, 20 nt, Artificial Sequence
  source: /note="Description of Artificial Sequence: Synthetic oligonucleotide"
ggccacauuugugaguuuag

SEQ ID NO: 1542 - RNA, 20 nt, Artificial Sequence
  source: /note="Description of Artificial Sequence: Synthetic oligonucleotide"
uaccacuaaacucacaaaug

SEQ ID NO: 1543 - RNA, 20 nt, Artificial Sequence
  source: /note="Description of Artificial Sequence: Synthetic oligonucleotide"
uaaaaucagaaauacagucu

SEQ ID NO: 1544 - RNA, 20 nt, Artificial Sequence
  source: /note="Description of Artificial Sequence: Synthetic oligonucleotide"
aaaagauguacuuagauaug

SEQ ID NO: 1545 - RNA, 20 nt, Artificial Sequence
  source: /note="Description of Artificial Sequence: Synthetic oligonucleotide"
uguacuuagauauguggauc

SEQ ID NO: 1546 - RNA, 20 nt, Artificial Sequence
  source: /note="Description of Artificial Sequence: Synthetic oligonucleotide"
agcucagaaagaauacaacc

SEQ ID NO: 1547 - RNA, 20 nt, Artificial Sequence
  source: /note="Description of Artificial Sequence: Synthetic oligonucleotide"
accaggucaagaauacagaa

SEQ ID NO: 1548 - RNA, 20 nt, Artificial Sequence
  source: /note="Description of Artificial Sequence: Synthetic oligonucleotide"
uccauucuguauucuugacc

SEQ ID NO: 1549 - RNA, 20 nt, Artificial Sequence
  source: /note="Description of Artificial Sequence: Synthetic oligonucleotide"
cugucauuuuuaacagguag

SEQ ID NO: 1550 - RNA, 20 nt, Artificial Sequence
  source: /note="Description of Artificial Sequence: Synthetic oligonucleotide"
caucaucugucauuuuuaac

SEQ ID NO: 1551 - RNA, 20 nt, Artificial Sequence
  source: /note="Description of Artificial Sequence: Synthetic oligonucleotide"
aaacacauucuaagauuuua

SEQ ID NO: 1552 - RNA, 20 nt, Artificial Sequence
  source: /note="Description of Artificial Sequence: Synthetic oligonucleotide"
aaucuuagaauguguuugug

SEQ ID NO: 1553 - RNA, 20 nt, Artificial Sequence
  source: /note="Description of Artificial Sequence: Synthetic oligonucleotide"
aucuuagaauguguuuguga

SEQ ID NO: 1554 - RNA, 20 nt, Artificial Sequence
  source: /note="Description of Artificial Sequence: Synthetic oligonucleotide"
uuagaauguguuugugaggg

SEQ ID NO: 1555 - RNA, 20 nt, Artificial Sequence
  source: /note="Description of Artificial Sequence: Synthetic oligonucleotide"
caauuuucuuauauaugaau

SEQ ID NO: 1556 - RNA, 20 nt, Artificial Sequence
  source: /note="Description of Artificial Sequence: Synthetic oligonucleotide"
uugauucuaaaaaaaauguu

SEQ ID NO: 1557 - RNA, 20 nt, Artificial Sequence
  source: /note="Description of Artificial Sequence: Synthetic oligonucleotide"
aaauguuagguaaauucuua

SEQ ID NO: 1558 - RNA, 20 nt, Artificial Sequence
  source: /note="Description of Artificial Sequence: Synthetic oligonucleotide"
gguaaauucuuaaggccaug

SEQ ID NO: 1559 - RNA, 20 nt, Artificial Sequence
  source: /note="Description of Artificial Sequence: Synthetic oligonucleotide"
agaucaaauaacaguccuca

SEQ ID NO: 1560 - RNA, 20 nt, Artificial Sequence
  source: /note="Description of Artificial Sequence: Synthetic oligonucleotide"
gucuguuaauuccaaagacu

SEQ ID NO: 1561 - RNA, 20 nt, Artificial Sequence
  source: /note="Description of Artificial Sequence: Synthetic oligonucleotide"
aaagugaaaagccaagucuu

SEQ ID NO: 1562 - RNA, 20 nt, Artificial Sequence
  source: /note="Description of Artificial Sequence: Synthetic oligonucleotide"
ccugaaaugauuuuacacau

SEQ ID NO: 1563 - RNA, 20 nt, Artificial Sequence
  source: /note="Description of Artificial Sequence: Synthetic oligonucleotide"
ccaauguguaaaaucauuuc

SEQ ID NO: 1564 - RNA, 20 nt, Artificial Sequence
  source: /note="Description of Artificial Sequence: Synthetic oligonucleotide"
cugaaaugauuuuacacauu

SEQ ID NO: 1565 - RNA, 20 nt, Artificial Sequence
  source: /note="Description of Artificial Sequence: Synthetic oligonucleotide"
auuuuacacauugggagauc

SEQ ID NO: 1566 - RNA, 20 nt, Artificial Sequence
  source: /note="Description of Artificial Sequence: Synthetic oligonucleotide"
gguuacauguuuauucuaua

SEQ ID NO: 1567 - RNA, 20 nt, Artificial Sequence
  source: /note="Description of Artificial Sequence: Synthetic oligonucleotide"
ucuauauggauugcauugag

SEQ ID NO: 1568 - RNA, 20 nt, Artificial Sequence
  source: /note="Description of Artificial Sequence: Synthetic oligonucleotide"
aggauuuguauaacagaaua

SEQ ID NO: 1569 - RNA, 20 nt, Artificial Sequence
  source: /note="Description of Artificial Sequence: Synthetic oligonucleotide"
uuuucuuuucucuucugaga

SEQ ID NO: 1570 - RNA, 20 nt, Artificial Sequence
  source: /note="Description of Artificial Sequence: Synthetic oligonucleotide"
gcacucuagcuugggcaaua

SEQ ID NO: 1571 - RNA, 20 nt, Artificial Sequence
  source: /note="Description of Artificial Sequence: Synthetic oligonucleotide"
ugcacucuagcuugggcaau

SEQ ID NO: 1572 - RNA, 20 nt, Artificial Sequence
  source: /note="Description of Artificial Sequence: Synthetic oligonucleotide"
ugcaccauugcacucuagcu

SEQ ID NO: 1573 - RNA, 20 nt, Artificial Sequence
  source: /note="Description of Artificial Sequence: Synthetic oligonucleotide"
gcuauucagguggcugaggc

SEQ ID NO: 1574 - RNA, 20 nt, Artificial Sequence
  source: /note="Description of Artificial Sequence: Synthetic oligonucleotide"
accugaauagcugggacugc

SEQ ID NO: 1575 - RNA, 20 nt, Artificial Sequence
  source: /note="Description of Artificial Sequence: Synthetic oligonucleotide"
gcaggcaugcaccacacgcc

SEQ ID NO: 1576 - RNA, 20 nt, Artificial Sequence
  source: /note="Description of Artificial Sequence: Synthetic oligonucleotide"
uacaaaaucagccgggcgug

SEQ ID NO: 1577 - RNA, 20 nt, Artificial Sequence
  source: /note="Description of Artificial Sequence: Synthetic oligonucleotide"
ggcuuguaaacccagcacuu

SEQ ID NO: 1578 - RNA, 20 nt, Artificial Sequence
  source: /note="Description of Artificial Sequence: Synthetic oligonucleotide"
cuggcuggaugcgguggcuc

SEQ ID NO: 1579 - RNA, 20 nt, Artificial Sequence
  source: /note="Description of Artificial Sequence: Synthetic oligonucleotide"
cugagccaccgcauccagcc

SEQ ID NO: 1580 - RNA, 20 nt, Artificial Sequence
  source: /note="Description of Artificial Sequence: Synthetic oligonucleotide"
cuuauccuggcuggaugcgg

SEQ ID NO: 1581 - RNA, 20 nt, Artificial Sequence
  source: /note="Description of Artificial Sequence: Synthetic oligonucleotide"
caccgcauccagccaggaua

SEQ ID NO: 1582 - RNA, 20 nt, Artificial Sequence
  source: /note="Description of Artificial Sequence: Synthetic oligonucleotide"
gaccuuauccuggcuggaug

SEQ ID NO: 1583 - RNA, 20 nt, Artificial Sequence
  source: /note="Description of Artificial Sequence: Synthetic oligonucleotide"
cuuuuagaccuuauccuggc

SEQ ID NO: 1584 - RNA, 20 nt, Artificial Sequence
  source: /note="Description of Artificial Sequence: Synthetic oligonucleotide"
gccaggauaaggucuaaaag

SEQ ID NO: 1585 - RNA, 20 nt, Artificial Sequence
  source: /note="Description of Artificial Sequence: Synthetic oligonucleotide"
uccacuuuuagaccuuaucc

SEQ ID NO: 1586 - RNA, 20 nt, Artificial Sequence
  source: /note="Description of Artificial Sequence: Synthetic oligonucleotide"
aauagcaucuacucuuguuc

SEQ ID NO: 1587 - RNA, 20 nt, Artificial Sequence
  source: /note="Description of Artificial Sequence: Synthetic oligonucleotide"
cucuuguucaggaaacaaug

SEQ ID NO: 1588 - RNA, 20 nt, Artificial Sequence
  source: /note="Description of Artificial Sequence: Synthetic oligonucleotide"
ggaaacaaugaggaccugac

SEQ ID NO: 1589 - RNA, 20 nt, Artificial Sequence
  source: /note="Description of Artificial Sequence: Synthetic oligonucleotide"
gaaacaaugaggaccugacu

SEQ ID NO: 1590 - RNA, 20 nt, Artificial Sequence
  source: /note="Description of Artificial Sequence: Synthetic oligonucleotide"
accugacugggcaguaagag

SEQ ID NO: 1591 - RNA, 20 nt, Artificial Sequence
  source: /note="Description of Artificial Sequence: Synthetic oligonucleotide"
accacucuuacugcccaguc

SEQ ID NO: 1592 - RNA, 20 nt, Artificial Sequence
  source: /note="Description of Artificial Sequence: Synthetic oligonucleotide"
aagaguggugauuaauagau

SEQ ID NO: 1593 - RNA, 20 nt, Artificial Sequence
  source: /note="Description of Artificial Sequence: Synthetic oligonucleotide"
agaguggugauuaauagaua

SEQ ID NO: 1594 - RNA, 20 nt, Artificial Sequence
  source: /note="Description of Artificial Sequence: Synthetic oligonucleotide"
agaaucgaacuguugauuag

SEQ ID NO: 1595 - RNA, 20 nt, Artificial Sequence
  source: /note="Description of Artificial Sequence: Synthetic oligonucleotide"
ucgaacuguugauuagaggu

SEQ ID NO: 1596 - RNA, 20 nt, Artificial Sequence
  source: /note="Description of Artificial Sequence: Synthetic oligonucleotide"
ccuggcagacccucaagagc

SEQ ID NO: 1597 - RNA, 20 nt, Artificial Sequence
  source: /note="Description of Artificial Sequence: Synthetic oligonucleotide"
ccuggcagacccucaagagc

SEQ ID NO: 1598 - RNA, 20 nt, Artificial Sequence
  source: /note="Description of Artificial Sequence: Synthetic oligonucleotide"
cuggcagacccucaagagca

SEQ ID NO: 1599 - RNA, 20 nt, Artificial Sequence
  source: /note="Description of Artificial Sequence: Synthetic oligonucleotide"
uggcagacccucaagagcag

SEQ ID NO: 1600 - RNA, 20 nt, Artificial Sequence
  source: /note="Description of Artificial Sequence: Synthetic oligonucleotide"
cccucaagagcaggggucuu

SEQ ID NO: 1601 - RNA, 20 nt, Artificial Sequence
  source: /note="Description of Artificial Sequence: Synthetic oligonucleotide"
ccucaagagcaggggucuuc

SEQ ID NO: 1602 - RNA, 20 nt, Artificial Sequence
  source: /note="Description of Artificial Sequence: Synthetic oligonucleotide"
uaaggccaguggaaagaauu

SEQ ID NO: 1603 - RNA, 20 nt, Artificial Sequence
  source: /note="Description of Artificial Sequence: Synthetic oligonucleotide"
aagagcaggggucuucucuu

SEQ ID NO: 1604 - RNA, 20 nt, Artificial Sequence
  source: /note="Description of Artificial Sequence: Synthetic oligonucleotide"
agagcaggggucuucucuuu

SEQ ID NO: 1605 - RNA, 20 nt, Artificial Sequence
  source: /note="Description of Artificial Sequence: Synthetic oligonucleotide"
gagcaggggucuucucuuug

SEQ ID NO: 1606 - RNA, 20 nt, Artificial Sequence
  source: /note="Description of Artificial Sequence: Synthetic oligonucleotide"
agcaggggucuucucuuugg

SEQ ID NO: 1607 - RNA, 20 nt, Artificial Sequence
  source: /note="Description of Artificial Sequence: Synthetic oligonucleotide"
aggggucuucucuuuggggg

SEQ ID NO: 1608 - RNA, 20 nt, Artificial Sequence
  source: /note="Description of Artificial Sequence: Synthetic oligonucleotide"
gggaggacaucacucuuagc

SEQ ID NO: 1609 - RNA, 20 nt, Artificial Sequence
  source: /note="Description of Artificial Sequence: Synthetic oligonucleotide"
ggaggacaucacucuuagca

SEQ ID NO: 1610 - RNA, 20 nt, Artificial Sequence
  source: /note="Description of Artificial Sequence: Synthetic oligonucleotide"
gccagacuccaaguucugcc

SEQ ID NO: 1611 - RNA, 20 nt, Artificial Sequence
  source: /note="Description of Artificial Sequence: Synthetic oligonucleotide"
gacaucacucuuagcagggc

SEQ ID NO: 1612 - RNA, 20 nt, Artificial Sequence
  source: /note="Description of Artificial Sequence: Synthetic oligonucleotide"
acaucacucuuagcagggcu

SEQ ID NO: 1613 - RNA, 20 nt, Artificial Sequence
  source: /note="Description of Artificial Sequence: Synthetic oligonucleotide"
caucacucuuagcagggcug

SEQ ID NO: 1614 - RNA, 20 nt, Artificial Sequence
  source: /note="Description of Artificial Sequence: Synthetic oligonucleotide"
gcuggggugagucaaaaguc

SEQ ID NO: 1615 - RNA, 20 nt, Artificial Sequence
  source: /note="Description of Artificial Sequence: Synthetic oligonucleotide"
cuggggugagucaaaagucu

SEQ ID NO: 1616 - RNA, 20 nt, Artificial Sequence
  source: /note="Description of Artificial Sequence: Synthetic oligonucleotide"
gagucaaaagucugggagaa

SEQ ID NO: 1617 - RNA, 20 nt, Artificial Sequence
  source: /note="Description of Artificial Sequence: Synthetic oligonucleotide"
ucaaaagucugggagaaugg

SEQ ID NO: 1618 - RNA, 20 nt, Artificial Sequence
  source: /note="Description of Artificial Sequence: Synthetic oligonucleotide"
agucugggagaauggaggug

SEQ ID NO: 1619 - RNA, 20 nt, Artificial Sequence
  source: /note="Description of Artificial Sequence: Synthetic oligonucleotide"
cugggagaauggaggugugg

SEQ ID NO: 1620 - RNA, 20 nt, Artificial Sequence
  source: /note="Description of Artificial Sequence: Synthetic oligonucleotide"
ugggagaauggaggugugga

SEQ ID NO: 1621 - RNA, 20 nt, Artificial Sequence
  source: /note="Description of Artificial Sequence: Synthetic oligonucleotide"
gggagaauggagguguggag

SEQ ID NO: 1622 - RNA, 20 nt, Artificial Sequence
  source: /note="Description of Artificial Sequence: Synthetic oligonucleotide"
ggagguguggaggggauaac

SEQ ID NO: 1623 - RNA, 20 nt, Artificial Sequence
  source: /note="Description of Artificial Sequence: Synthetic oligonucleotide"
ggcagcgaggaguccacagu

SEQ ID NO: 1624 - RNA, 20 nt, Artificial Sequence
  source: /note="Description of Artificial Sequence: Synthetic oligonucleotide"
gagguguggaggggauaacu

SEQ ID NO: 1625 - RNA, 20 nt, Artificial Sequence
  source: /note="Description of Artificial Sequence: Synthetic oligonucleotide"
aacugggucagaccccaagc

SEQ ID NO: 1626 - RNA, 20 nt, Artificial Sequence
  source: /note="Description of Artificial Sequence: Synthetic oligonucleotide"
gggucagaccccaagcagga

SEQ ID NO: 1627 - RNA, 20 nt, Artificial Sequence
  source: /note="Description of Artificial Sequence: Synthetic oligonucleotide"
ggucagaccccaagcaggaa

SEQ ID NO: 1628 - RNA, 20 nt, Artificial Sequence
  source: /note="Description of Artificial Sequence: Synthetic oligonucleotide"
ccccaagcaggaagggccuc

SEQ ID NO: 1629 - RNA, 20 nt, Artificial Sequence
  source: /note="Description of Artificial Sequence: Synthetic oligonucleotide"
cccaagcaggaagggccucu

SEQ ID NO: 1630 - RNA, 20 nt, Artificial Sequence
  source: /note="Description of Artificial Sequence: Synthetic oligonucleotide"
ccaagcaggaagggccucua

SEQ ID NO: 1631 - RNA, 20 nt, Artificial Sequence
  source: /note="Description of Artificial Sequence: Synthetic oligonucleotide"
aggaagggccucuauguaga

SEQ ID NO: 1632 - RNA, 20 nt, Artificial Sequence
  source: /note="Description of Artificial Sequence: Synthetic oligonucleotide"
ggaagggccucuauguagac

SEQ ID NO: 1633 - RNA, 20 nt, Artificial Sequence
  source: /note="Description of Artificial Sequence: Synthetic oligonucleotide"
ccucuauguagacgggugug

SEQ ID NO: 1634 - RNA, 20 nt, Artificial Sequence
  source: /note="Description of Artificial Sequence: Synthetic oligonucleotide"
ccucuauguagacgggugug

SEQ ID NO: 1635 - RNA, 20 nt, Artificial Sequence
  source: /note="Description of Artificial Sequence: Synthetic oligonucleotide"
gacggguguguggcuccuua

SEQ ID NO: 1636 - RNA, 20 nt, Artificial Sequence
  source: /note="Description of Artificial Sequence: Synthetic oligonucleotide"
ccuuaaggugacccagcagc

SEQ ID NO: 1637 - RNA, 20 nt, Artificial Sequence
  source: /note="Description of Artificial Sequence: Synthetic oligonucleotide"
uuaaggugacccagcagccc

SEQ ID NO: 1638 - RNA, 20 nt, Artificial Sequence
  source: /note="Description of Artificial Sequence: Synthetic oligonucleotide"
uaaggugacccagcagcccu

SEQ ID NO: 1639 - RNA, 20 nt, Artificial Sequence
  source: /note="Description of Artificial Sequence: Synthetic oligonucleotide"
cccagcagcccugggcacag

SEQ ID NO: 1640 - RNA, 20 nt, Artificial Sequence
  source: /note="Description of Artificial Sequence: Synthetic oligonucleotide"
ccagcagcccugggcacaga

SEQ ID NO: 1641 - RNA, 20 nt, Artificial Sequence
  source: /note="Description of Artificial Sequence: Synthetic oligonucleotide"
gccagacuccaaguucugcc

SEQ ID NO: 1642 - RNA, 20 nt, Artificial Sequence
  source: /note="Description of Artificial Sequence: Synthetic oligonucleotide"
agcagcccugggcacagaag

SEQ ID NO: 1643 - RNA, 20 nt, Artificial Sequence
  source: /note="Description of Artificial Sequence: Synthetic oligonucleotide"
cccugggcacagaaguggug

SEQ ID NO: 1644 - RNA, 20 nt, Artificial Sequence
  source: /note="Description of Artificial Sequence: Synthetic oligonucleotide"
ccugggcacagaaguggugc

SEQ ID NO: 1645 - RNA, 20 nt, Artificial Sequence
  source: /note="Description of Artificial Sequence: Synthetic oligonucleotide"
cugggcacagaaguggugcg

SEQ ID NO: 1646 - RNA, 20 nt, Artificial Sequence
  source: /note="Description of Artificial Sequence: Synthetic oligonucleotide"
ugccaacagugauaaccagc

SEQ ID NO: 1647 - RNA, 20 nt, Artificial Sequence
  source: /note="Description of Artificial Sequence: Synthetic oligonucleotide"
gccaacagugauaaccagca

SEQ ID NO: 1648 - RNA, 20 nt, Artificial Sequence
  source: /note="Description of Artificial Sequence: Synthetic oligonucleotide"
uaaggccaguggaaagaauu

SEQ ID NO: 1649 - RNA, 20 nt, Artificial Sequence
  source: /note="Description of Artificial Sequence: Synthetic oligonucleotide"
ccaacagugauaaccagcag

SEQ ID NO: 1650 - RNA, 20 nt, Artificial Sequence
  source: /note="Description of Artificial Sequence: Synthetic oligonucleotide"
ccagcagggccugucagaag

SEQ ID NO: 1651 - RNA, 20 nt, Artificial Sequence
  source: /note="Description of Artificial Sequence: Synthetic oligonucleotide"
ccagcagggccugucagaag

SEQ ID NO: 1652 - RNA, 20 nt, Artificial Sequence
  source: /note="Description of Artificial Sequence: Synthetic oligonucleotide"
gggccugucagaagaggccc

SEQ ID NO: 1653 - RNA, 20 nt, Artificial Sequence
  source: /note="Description of Artificial Sequence: Synthetic oligonucleotide"
ccugucagaagaggcccugg

SEQ ID NO: 1654 - RNA, 20 nt, Artificial Sequence
  source: /note="Description of Artificial Sequence: Synthetic oligonucleotide"
gaagaggcccuggacacuga

SEQ ID NO: 1655 - RNA, 20 nt, Artificial Sequence
  source: /note="Description of Artificial Sequence: Synthetic oligonucleotide"
aggcccuggacacugaaggc

SEQ ID NO: 1656 - RNA, 20 nt, Artificial Sequence
  source: /note="Description of Artificial Sequence: Synthetic oligonucleotide"
ggcccuggacacugaaggcu

SEQ ID NO: 1657 - RNA, 20 nt, Artificial Sequence
  source: /note="Description of Artificial Sequence: Synthetic oligonucleotide"
ucuuuccacuggccuuaacc

SEQ ID NO: 1658 - RNA, 20 nt, Artificial Sequence
  source: /note="Description of Artificial Sequence: Synthetic oligonucleotide"
cccuggacacugaaggcugg

SEQ ID NO: 1659 - RNA, 20 nt, Artificial Sequence
  source: /note="Description of Artificial Sequence: Synthetic oligonucleotide"
ccuggacacugaaggcuggg

SEQ ID NO: 1660 - RNA, 20 nt, Artificial Sequence
  source: /note="Description of Artificial Sequence: Synthetic oligonucleotide"
cugaaggcugggcacagccu

SEQ ID NO: 1661 - RNA, 20 nt, Artificial Sequence
  source: /note="Description of Artificial Sequence: Synthetic oligonucleotide"
ugaaggcugggcacagccuu

SEQ ID NO: 1662 - RNA, 20 nt, Artificial Sequence
  source: /note="Description of Artificial Sequence: Synthetic oligonucleotide"
gaaggcugggcacagccuug

SEQ ID NO: 1663 - RNA, 20 nt, Artificial Sequence
  source: /note="Description of Artificial Sequence: Synthetic oligonucleotide"
cagccuuggggaccgcucac

SEQ ID NO: 1664 - RNA, 20 nt, Artificial Sequence
  source: /note="Description of Artificial Sequence: Synthetic oligonucleotide"
ccuuggggaccgcucacagg

SEQ ID NO: 1665 - RNA, 20 nt, Artificial Sequence
  source: /note="Description of Artificial Sequence: Synthetic oligonucleotide"
ccgcucacaggacaugcagc

SEQ ID NO: 1666 - RNA, 20 nt, Artificial Sequence
  source: /note="Description of Artificial Sequence: Synthetic oligonucleotide"
ccgacaacucccuaccgcga

SEQ ID NO: 1667 - RNA, 20 nt, Artificial Sequence
  source: /note="Description of Artificial Sequence: Synthetic oligonucleotide"
cccuaccgcgaccccuauca

SEQ ID NO: 1668 - RNA, 20 nt, Artificial Sequence
  source: /note="Description of Artificial Sequence: Synthetic oligonucleotide"
ccuaccgcgaccccuaucag

SEQ ID NO: 1669 - RNA, 20 nt, Artificial Sequence
  source: /note="Description of Artificial Sequence: Synthetic oligonucleotide"
ccgcgaccccuaucagugcc

SEQ ID NO: 1670 - RNA, 20 nt, Artificial Sequence
  source: /note="Description of Artificial Sequence: Synthetic oligonucleotide"
ccccuaucagugccgaccaa

SEQ ID NO: 1671 - RNA, 20 nt, Artificial Sequence
  source: /note="Description of Artificial Sequence: Synthetic oligonucleotide"
cccuaucagugccgaccaag

SEQ ID NO: 1672 - RNA, 20 nt, Artificial Sequence
  source: /note="Description of Artificial Sequence: Synthetic oligonucleotide"
ccuaucagugccgaccaagc

SEQ ID NO: 1673 - RNA, 20 nt, Artificial Sequence
  source: /note="Description of Artificial Sequence: Synthetic oligonucleotide"
ccgaccaagcacacaagaug

SEQ ID NO: 1674 - RNA, 20 nt, Artificial Sequence
  source: /note="Description of Artificial Sequence: Synthetic oligonucleotide"
ccaagcacacaagaugcaca

SEQ ID NO: 1675 - RNA, 20 nt, Artificial Sequence
  source: /note="Description of Artificial Sequence: Synthetic oligonucleotide"
agcacacaagaugcacaccc

SEQ ID NO: 1676 - RNA, 20 nt, Artificial Sequence
  source: /note="Description of Artificial Sequence: Synthetic oligonucleotide"
cacaagaugcacacccaggc

SEQ ID NO: 1677 - RNA, 20 nt, Artificial Sequence
  source: /note="Description of Artificial Sequence: Synthetic oligonucleotide"
acaagaugcacacccaggcu

SEQ ID NO: 1678 - RNA, 20 nt, Artificial Sequence
  source: /note="Description of Artificial Sequence: Synthetic oligonucleotide"
ucuuuccacuggccuuaacc

SEQ ID NO: 1679 - RNA, 20 nt, Artificial Sequence
  source: /note="Description of Artificial Sequence: Synthetic oligonucleotide"
gaugcacacccaggcugggc

SEQ ID NO: 1680 - RNA, 20 nt, Artificial Sequence
  source: /note="Description of Artificial Sequence: Synthetic oligonucleotide"
acccaggcugggcuggacag

SEQ ID NO: 1681 - RNA, 20 nt, Artificial Sequence
  source: /note="Description of Artificial Sequence: Synthetic oligonucleotide"
cccaggcugggcuggacaga

SEQ ID NO: 1682 - RNA, 20 nt, Artificial Sequence
  source: /note="Description of Artificial Sequence: Synthetic oligonucleotide"
cccaggcugggcuggacaga

SEQ ID NO: 1683 - RNA, 20 nt, Artificial Sequence
  source: /note="Description of Artificial Sequence: Synthetic oligonucleotide"
ccaggcugggcuggacagag

SEQ ID NO: 1684 - RNA, 20 nt, Artificial Sequence
  source: /note="Description of Artificial Sequence: Synthetic oligonucleotide"
ccaggcugggcuggacagag

SEQ ID NO: 1685 - RNA, 20 nt, Artificial Sequence
  source: /note="Description of Artificial Sequence: Synthetic oligonucleotide"
gaggggucccacaagaucac

SEQ ID NO: 1686 - RNA, 20 nt, Artificial Sequence
  source: /note="Description of Artificial Sequence: Synthetic oligonucleotide"
aggggucccacaagaucaca

SEQ ID NO: 1687 - RNA, 20 nt, Artificial Sequence
  source: /note="Description of Artificial Sequence: Synthetic oligonucleotide"
cccacaagaucacagggugu

SEQ ID NO: 1688 - RNA, 20 nt, Artificial Sequence
  source: /note="Description of Artificial Sequence: Synthetic oligonucleotide"
ggcagcgaggaguccacagu

SEQ ID NO: 1689 - RNA, 20 nt, Artificial Sequence
  source: /note="Description of Artificial Sequence: Synthetic oligonucleotide"
ccacaagaucacagggugug

SEQ ID NO: 1690 - RNA, 20 nt, Artificial Sequence
  source: /note="Description of Artificial Sequence: Synthetic oligonucleotide"
ucacagggugugcccugaga

SEQ ID NO: 1691 - RNA, 20 nt, Artificial Sequence
  source: /note="Description of Artificial Sequence: Synthetic oligonucleotide"
cagggugugcccugagaagg

SEQ ID NO: 1692 - RNA, 20 nt, Artificial Sequence
  source: /note="Description of Artificial Sequence: Synthetic oligonucleotide"
cgaacuguugauuagaggua

SEQ ID NO: 1693 - RNA, 20 nt, Artificial Sequence
  source: /note="Description of Artificial Sequence: Synthetic oligonucleotide"
augauuuuaaucugugaccu

SEQ ID NO: 1694 - RNA, 20 nt, Artificial Sequence
  source: /note="Description of Artificial Sequence: Synthetic oligonucleotide"
uaaucugugaccuuggugaa

SEQ ID NO: 1695 - RNA, 20 nt, Artificial Sequence
  source: /note="Description of Artificial Sequence: Synthetic oligonucleotide"
aaucugugaccuuggugaau

SEQ ID NO: 1696 - RNA, 20 nt, Artificial Sequence
  source: /note="Description of Artificial Sequence: Synthetic oligonucleotide"
agcuacuugcccauucacca

SEQ ID NO: 1697 - RNA, 20 nt, Artificial Sequence
  source: /note="Description of Artificial Sequence: Synthetic oligonucleotide"
uagcuaucuaaugacuaaaa

SEQ ID NO: 1698 - RNA, 20 nt, Artificial Sequence
  source: /note="Description of Artificial Sequence: Synthetic oligonucleotide"
augacuaaaauggaaaacac

SEQ ID NO: 1699 - RNA, 20 nt, Artificial Sequence
  source: /note="Description of Artificial Sequence: Synthetic oligonucleotide"
aaauacccaugcugagucug

SEQ ID NO: 1700 - RNA, 20 nt, Artificial Sequence
  source: /note="Description of Artificial Sequence: Synthetic oligonucleotide"
aggcaccucagacucagcau

SEQ ID NO: 1701 - RNA, 20 nt, Artificial Sequence
  source: /note="Description of Artificial Sequence: Synthetic oligonucleotide"
uaggcaccucagacucagca

SEQ ID NO: 1702 - RNA, 20 nt, Artificial Sequence
  source: /note="Description of Artificial Sequence: Synthetic oligonucleotide"
gcugagucugaggugccuau

SEQ ID NO: 1703 - RNA, 20 nt, Artificial Sequence
  source: /note="Description of Artificial Sequence: Synthetic oligonucleotide"
uauuuauauagauguccuau

SEQ ID NO: 1704 - RNA, 20 nt, Artificial Sequence
  source: /note="Description of Artificial Sequence: Synthetic oligonucleotide"
cauauaucaaacaauguacu

SEQ ID NO: 1705 - RNA, 20 nt, Artificial Sequence
  source: /note="Description of Artificial Sequence: Synthetic oligonucleotide"
ccaguacauuguuugauaua

SEQ ID NO: 1706 - RNA, 20 nt, Artificial Sequence
  source: /note="Description of Artificial Sequence: Synthetic oligonucleotide"
ccauauaucaaacaauguac

SEQ ID NO: 1707 - RNA, 20 nt, Artificial Sequence
  source: /note="Description of Artificial Sequence: Synthetic oligonucleotide"
caguacauuguuugauauau

SEQ ID NO: 1708 - RNA, 20 nt, Artificial Sequence
  source: /note="Description of Artificial Sequence: Synthetic oligonucleotide"
cauuguuugauauauggguu

SEQ ID NO: 1709 - RNA, 20 nt, Artificial Sequence
  source: /note="Description of Artificial Sequence: Synthetic oligonucleotide"
gauauauggguuuggcacug

SEQ ID NO: 1710 - RNA, 20 nt, Artificial Sequence
  source: /note="Description of Artificial Sequence: Synthetic oligonucleotide"
uauggguuuggcacugaggu

SEQ ID NO: 1711 - RNA, 20 nt, Artificial Sequence
  source: /note="Description of Artificial Sequence: Synthetic oligonucleotide"
ggguuuggcacugagguugg

SEQ ID NO: 1712 - RNA, 20 nt, Artificial Sequence
  source: /note="Description of Artificial Sequence: Synthetic oligonucleotide"
gcacugagguuggaggucag

SEQ ID NO: 1713 - RNA, 20 nt, Artificial Sequence
  source: /note="Description of Artificial Sequence: Synthetic oligonucleotide"
cagagguuagaaaucagagu

SEQ ID NO: 1714 - RNA, 20 nt, Artificial Sequence
  source: /note="Description of Artificial Sequence: Synthetic oligonucleotide"
agagguuagaaaucagaguu

SEQ ID NO: 1715 - RNA, 20 nt, Artificial Sequence
  source: /note="Description of Artificial Sequence: Synthetic oligonucleotide"
uagaaaucagaguugggaau

SEQ ID NO: 1716 - RNA, 20 nt, Artificial Sequence
  source: /note="Description of Artificial Sequence: Synthetic oligonucleotide"
agaaaucagaguugggaauu

SEQ ID NO: 1717 - RNA, 20 nt, Artificial Sequence
  source: /note="Description of Artificial Sequence: Synthetic oligonucleotide"
guugggaauugggauuauac

SEQ ID NO: 1718 - RNA, 20 nt, Artificial Sequence
  source: /note="Description of Artificial Sequence: Synthetic oligonucleotide"
cuuuguauucaucacacucu

SEQ ID NO: 1719 - RNA, 20 nt, Artificial Sequence
  source: /note="Description of Artificial Sequence: Synthetic oligonucleotide"
augaauacaaaguuaaauga

SEQ ID NO: 1720 - RNA, 20 nt, Artificial Sequence
  source: /note="Description of Artificial Sequence: Synthetic oligonucleotide"
uaaauguugguguucauuaa

SEQ ID NO: 1721 - RNA, 20 nt, Artificial Sequence
  source: /note="Description of Artificial Sequence: Synthetic oligonucleotide"
ugagauuucacauuaaaugu

SEQ ID NO: 1722 - RNA, 20 nt, Artificial Sequence
  source: /note="Description of Artificial Sequence: Synthetic oligonucleotide"
acauuuaaugugaaaucuca

SEQ ID NO: 1723 - RNA, 20 nt, Artificial Sequence
  source: /note="Description of Artificial Sequence: Synthetic oligonucleotide"
uaaaaucaucggggauuuug

SEQ ID NO: 1724 - RNA, 20 nt, Artificial Sequence
  source: /note="Description of Artificial Sequence: Synthetic oligonucleotide"
cuaaaaucaucggggauuuu

SEQ ID NO: 1725 - RNA, 20 nt, Artificial Sequence
  source: /note="Description of Artificial Sequence: Synthetic oligonucleotide"
ucuaaaaucaucggggauuu

SEQ ID NO: 1726 - RNA, 20 nt, Artificial Sequence
  source: /note="Description of Artificial Sequence: Synthetic oligonucleotide"
acugaguucuaaaaucaucg

SEQ ID NO: 1727 - RNA, 20 nt, Artificial Sequence
  source: /note="Description of Artificial Sequence: Synthetic oligonucleotide"
uacugaguucuaaaaucauc

SEQ ID NO: 1728 - RNA, 20 nt, Artificial Sequence
  source: /note="Description of Artificial Sequence: Synthetic oligonucleotide"
auacugaguucuaaaaucau

SEQ ID NO: 1729 - RNA, 20 nt, Artificial Sequence
  source: /note="Description of Artificial Sequence: Synthetic oligonucleotide"
uaauuaguguaaugccaaug

SEQ ID NO: 1730 - RNA, 20 nt, Artificial Sequence
  source: /note="Description of Artificial Sequence: Synthetic oligonucleotide"
aauuaguguaaugccaaugu

SEQ ID NO: 1731 - RNA, 20 nt, Artificial Sequence
  source: /note="Description of Artificial Sequence: Synthetic oligonucleotide"
aaugccaauguggguuagaa

SEQ ID NO: 1732 - RNA, 20 nt, Artificial Sequence
  source: /note="Description of Artificial Sequence: Synthetic oligonucleotide"
acuuccauucuaacccacau

SEQ ID NO: 1733 - RNA, 20 nt, Artificial Sequence
  source: /note="Description of Artificial Sequence: Synthetic oligonucleotide"
aauggaagucaacuugcugu

SEQ ID NO: 1734 - RNA, 20 nt, Artificial Sequence
  source: /note="Description of Artificial Sequence: Synthetic oligonucleotide"
cuugcuguugguuucagagc

SEQ ID NO: 1735 - RNA, 20 nt, Artificial Sequence
  source: /note="Description of Artificial Sequence: Synthetic oligonucleotide"
cuguugguuucagagcaggu

SEQ ID NO: 1736 - RNA, 20 nt, Artificial Sequence
  source: /note="Description of Artificial Sequence: Synthetic oligonucleotide"
uucagagcagguaggagaua

SEQ ID NO: 1737 - RNA, 20 nt, Artificial Sequence
  source: /note="Description of Artificial Sequence: Synthetic oligonucleotide"
agugaaaagcugaaacaaaa

SEQ ID NO: 1738 - RNA, 20 nt, Artificial Sequence
  source: /note="Description of Artificial Sequence: Synthetic oligonucleotide"
aagcugaaacaaaaaggaaa

SEQ ID NO: 1739 - RNA, 20 nt, Artificial Sequence
  source: /note="Description of Artificial Sequence: Synthetic oligonucleotide"
ugaaacaaaaaggaaaaggu

SEQ ID NO: 1740 - RNA, 20 nt, Artificial Sequence
  source: /note="Description of Artificial Sequence: Synthetic oligonucleotide"
gaaacaaaaaggaaaaggua

SEQ ID NO: 1741 - RNA, 20 nt, Artificial Sequence
  source: /note="Description of Artificial Sequence: Synthetic oligonucleotide"
ggaaaagguagggugaaaga

SEQ ID NO: 1742 - RNA, 20 nt, Artificial Sequence
  source: /note="Description of Artificial Sequence: Synthetic oligonucleotide"
gaaaagguagggugaaagau

SEQ ID NO: 1743 - RNA, 20 nt, Artificial Sequence
  source: /note="Description of Artificial Sequence: Synthetic oligonucleotide"
aaagaugggaaauguaugua

SEQ ID NO: 1744 - RNA, 20 nt, Artificial Sequence
  source: /note="Description of Artificial Sequence: Synthetic oligonucleotide"
gaugggaaauguauguaagg

SEQ ID NO: 1745 - RNA, 20 nt, Artificial Sequence
  source: /note="Description of Artificial Sequence: Synthetic oligonucleotide"
uguaaggaggaugagccaca

SEQ ID NO: 1746 - RNA, 20 nt, Artificial Sequence
  source: /note="Description of Artificial Sequence: Synthetic oligonucleotide"
ggaggaugagccacauggua

SEQ ID NO: 1747 - RNA, 20 nt, Artificial Sequence
  source: /note="Description of Artificial Sequence: Synthetic oligonucleotide"
gaggaugagccacaugguau

SEQ ID NO: 1748 - RNA, 20 nt, Artificial Sequence
  source: /note="Description of Artificial Sequence: Synthetic oligonucleotide"
gaugagccacaugguauggg

SEQ ID NO: 1749 - RNA, 20 nt, Artificial Sequence
  source: /note="Description of Artificial Sequence: Synthetic oligonucleotide"
aguauaccucccauaccaug

SEQ ID NO: 1750 - RNA, 20 nt, Artificial Sequence
  source: /note="Description of Artificial Sequence: Synthetic oligonucleotide"
augguaugggagguauacua

SEQ ID NO: 1751 - RNA, 20 nt, Artificial Sequence
  source: /note="Description of Artificial Sequence: Synthetic oligonucleotide"
ggagguauacuaaggacucu

SEQ ID NO: 1752 - RNA, 20 nt, Artificial Sequence
  source: /note="Description of Artificial Sequence: Synthetic oligonucleotide"
gagguauacuaaggacucua

SEQ ID NO: 1753 - RNA, 20 nt, Artificial Sequence
  source: /note="Description of Artificial Sequence: Synthetic oligonucleotide"
acucuagggucagagaaaua

SEQ ID NO: 1754 - RNA, 20 nt, Artificial Sequence
  source: /note="Description of Artificial Sequence: Synthetic oligonucleotide"
cucuagggucagagaaauau

SEQ ID NO: 1755 - RNA, 20 nt, Artificial Sequence
  source: /note="Description of Artificial Sequence: Synthetic oligonucleotide"
aagaaugugaauuuuguaga

SEQ ID NO: 1756 - RNA, 20 nt, Artificial Sequence
  source: /note="Description of Artificial Sequence: Synthetic oligonucleotide"
uucuacaaaauucacauucu

SEQ ID NO: 1757 - RNA, 20 nt, Artificial Sequence
  source: /note="Description of Artificial Sequence: Synthetic oligonucleotide"
acaaaauucacauucuuggc

SEQ ID NO: 1758 - RNA, 20 nt, Artificial Sequence
  source: /note="Description of Artificial Sequence: Synthetic oligonucleotide"
caaaauucacauucuuggcu

SEQ ID NO: 1759 - RNA, 20 nt, Artificial Sequence
  source: /note="Description of Artificial Sequence: Synthetic oligonucleotide"
uucacauucuuggcugggug

SEQ ID NO: 1760 - RNA, 20 nt, Artificial Sequence
  source: /note="Description of Artificial Sequence: Synthetic oligonucleotide"
aggguggaucaccugauguu

SEQ ID NO: 1761 - RNA, 20 nt, Artificial Sequence
  source: /note="Description of Artificial Sequence: Synthetic oligonucleotide"
gaucucgaacuccuaacauc

SEQ ID NO: 1762 - RNA, 100 nt, Artificial Sequence; identical to SEQ ID NO: 342
  source: /note="Description of Artificial Sequence: Synthetic polynucleotide"

SEQ ID NO: 1763 - RNA, 100 nt, Artificial Sequence; identical to SEQ ID NO: 347
  source: /note="Description of Artificial Sequence: Synthetic polynucleotide"

SEQ ID NO: 1764 - RNA, 100 nt, Artificial Sequence; identical to SEQ ID NO: 351
  source: /note="Description of Artificial Sequence: Synthetic polynucleotide"

SEQ ID NO: 1765 - RNA, 100 nt, Artificial Sequence; identical to SEQ ID NO: 355
  source: /note="Description of Artificial Sequence: Synthetic polynucleotide"

SEQ ID NO: 1766 - RNA, 100 nt, Artificial Sequence; identical to SEQ ID NO: 359
  source: /note="Description of Artificial Sequence: Synthetic polynucleotide"

SEQ ID NO: 1767 - RNA, 100 nt, Artificial Sequence; identical to SEQ ID NO: 363
  source: /note="Description of Artificial Sequence: Synthetic polynucleotide"

SEQ ID NO: 1768 - RNA, 100 nt, Artificial Sequence; identical to SEQ ID NO: 367
  source: /note="Description of Artificial Sequence: Synthetic polynucleotide"

SEQ ID NO: 1769 - RNA, 100 nt, Artificial Sequence; identical to SEQ ID NO: 371
  source: /note="Description of Artificial Sequence: Synthetic polynucleotide"

SEQ ID NO: 1770 - RNA, 100 nt, Artificial Sequence; identical to SEQ ID NO: 375
  source: /note="Description of Artificial Sequence: Synthetic polynucleotide"

SEQ ID NO: 1771 - RNA, 100 nt, Artificial Sequence; identical to SEQ ID NO: 379
  source: /note="Description of Artificial Sequence: Synthetic polynucleotide"

SEQ ID NO: 1772 - RNA, 100 nt, Artificial Sequence; identical to SEQ ID NO: 383
  source: /note="Description of Artificial Sequence: Synthetic polynucleotide"

SEQ ID NO: 1773 - RNA, 100 nt, Artificial Sequence; identical to SEQ ID NO: 387
  source: /note="Description of Artificial Sequence: Synthetic polynucleotide"

SEQ ID NO: 1774 - RNA, 100 nt, Artificial Sequence; identical to SEQ ID NO: 391
  source: /note="Description of Artificial Sequence: Synthetic polynucleotide"

SEQ ID NO: 1775 - RNA, 100 nt, Artificial Sequence; identical to SEQ ID NO: 395
  source: /note="Description of Artificial Sequence: Synthetic polynucleotide"

SEQ ID NO: 1776-1999 - skipped (224 entries)

SEQ ID NO: 2000 - DNA, 110 bp, Artificial Sequence
  source: /note="Description of Artificial Sequence: Synthetic polynucleotide"
gtgccagatgaacttcccatgtttaagagctatgctggaaacagcatagcaagtttaaataaggctagtccgttatcaacttgaaaaagtggcaccgagtcggtgctttt

SEQ ID NO: 2001 - DNA, 25 bp, Artificial Sequence
  source: /note="Description of Artificial Sequence: Synthetic primer"
agctccaaactctcaaaccacaggg

SEQ ID NO: 2002 - DNA, 25 bp, Artificial Sequence
  source: /note="Description of Artificial Sequence: Synthetic primer"
tacaattttgggagtccacacggca

SEQ ID NO: 2003 - RNA, 36 nt, Artificial Sequence
  source: /note="Description of Artificial Sequence: Synthetic oligonucleotide"
  modified_base (1)..(20): a, c, u, g, unknown or other
nnnnnnnnnnnnnnnnnnnnguuuuagagcuaugcu

SEQ ID NO: 2004 - RNA, 36 nt, Artificial Sequence; identical to SEQ ID NO: 2003
  source: /note="Description of Artificial Sequence: Synthetic oligonucleotide"
  modified_base (1)..(20): a, c, u, g, unknown or other

SEQ ID NO: 2005 - protein, 835 aa, Homo sapiens
MSRRKQGKPQHLSKREFSPEPLEAILTDDEPDHGPLGAPEGDHDLLTCGQCQMNFPLGDILIFIEHKRKQCNGSLCLEKAVDKPPSPSPIEMKKASNPVEVGIQVTPEDDDCLSTSSRGICPKQEHIADKLLHWRGLSSPRSAHGALIPTPGMSAEYAPQGICKDEPSSYTCTTCKQPFTSAWFLLQHAQNTHGLRIYLESEHGSPLTPRVGIPSGLGAECPSQPPLHGIHIADNNPFNLLRIPGSVSREASGLAEGRFPPTPPLFSPPPRHHLDPHRIERLGAEEMALATHHPSAFDRVLRLNPMAMEPPAMDFSRRLRELAGNTSSPPLSPGRPSPMQRLLQPFQPGSKPPFLATPPLPPLQSAPPPSQPPVKSKSCEFCGKTFKFQSNLVVHRRSHTGEKPYKCNLCDHACTQASKLKRHMKTHMHKSSPMTVKSDDGLSTASSPEPGTSDLVGSASSALKSVVAKFKSENDPNLIPENGDEEEEEDDEEEEEEEEEEEEELTESERVDYGFGLSLEAARHHENSSRGAVVGVGDESRALPDVMQGMVLSSMQHFSEAFHQVLGEKHKRGHLAEAEGHRDTCDEDSVAGESDRIDDGTVNGRGCSPGESASGGLSKKLLLGSPSSLSPFSKRIKLEKEFDLPPAAMPNTENVYSQWLAGYAASRQLKDPFLSFGDSRQSPFASSSEHSSENGSLRFSTPPGELDGGISGRSGTGSGGSTPHISGPGPGRPSSKEGRRSDTCEYCGKVFKNCSNLTVHRRSHTGERPYKCELCNYACAQSSKLTRHMKTHGQVGKDVYKCEICKMPFSVYSTLEKHMKKWHSDRVLNNDIKTE

SEQ ID NO: 2006 - RNA, 10 nt, Artificial Sequence
  source: /note="Description of Artificial Sequence: Synthetic oligonucleotide"
  misc_feature (1)..(10): /note="This sequence may encompass 1-10 nucleotides"
uuuuuuuuuu

SEQ ID NO: 2007 - RNA, 10 nt, Artificial Sequence
  source: /note="Description of Artificial Sequence: Synthetic oligonucleotide"
  misc_feature (1)..(10): /note="This sequence may encompass 1-10 nucleotides"
aaaaaaaaaa

SEQ ID NO: 2008 - RNA, 36 nt, Artificial Sequence; identical to SEQ ID NO: 2003
  source: /note="Description of Artificial Sequence: Synthetic oligonucleotide"
  modified_base (1)..(20): a, c, u, g, unknown or other

SEQ ID NO: 2009 - RNA, 36 nt, Artificial Sequence; identical to SEQ ID NO: 2003
  source: /note="Description of Artificial Sequence: Synthetic oligonucleotide"
  modified_base (1)..(20): a, c, u, g, unknown or other

SEQ ID NO: 2010 - RNA, 42 nt, Artificial Sequence
  source: /note="Description of Artificial Sequence: Synthetic oligonucleotide"
  modified_base (1)..(20): a, c, u, g, unknown or other
nnnnnnnnnnnnnnnnnnnnguuuuagagcuaugcuguuuug

SEQ ID NO: 2011 - RNA, 42 nt, Artificial Sequence; identical to SEQ ID NO: 2010
  source: /note="Description of Artificial Sequence: Synthetic oligonucleotide"
  modified_base (1)..(20): a, c, u, g, unknown or other

SEQ ID NO: 2012 - RNA, 42 nt, Artificial Sequence; identical to SEQ ID NO: 2010
  source: /note="Description of Artificial Sequence: Synthetic oligonucleotide"
  modified_base (1)..(20): a, c, u, g, unknown or other

SEQ ID NO: 2013 - RNA, 100 nt, Artificial Sequence
  source: /note="Description of Artificial Sequence: Synthetic polynucleotide"
  modified_base (1)..(20): a, c, u, g, unknown or other
nnnnnnnnnnnnnnnnnnnnguuuuagagcuagaaauagcaaguuaaaauaaggcuaguccguuaucaacuugaaaaaguggcaccgagucggugcuuuu

SEQ ID NO: 2014 - RNA, 100 nt, Artificial Sequence; identical to SEQ ID NO: 2013
  source: /note="Description of Artificial Sequence: Synthetic polynucleotide"
  modified_base (1)..(20): a, c, u, g, unknown or other

SEQ ID NO: 2015 - RNA, 100 nt, Artificial Sequence; identical to SEQ ID NO: 2013
  source: /note="Description of Artificial Sequence: Synthetic polynucleotide"
  modified_base (1)..(20): a, c, u, g, unknown or other

SEQ ID NO: 2016 - RNA, 20 nt, Artificial Sequence
  source: /note="Description of Artificial Sequence: Synthetic oligonucleotide"
gugccagaugaacuucccau

SEQ ID NO: 2017 - RNA, 20 nt, Artificial Sequence
  source: /note="Description of Artificial Sequence: Synthetic oligonucleotide"
cacaaacggaaacaaugcaa

SEQ ID NO: 2018 - DNA, 21 bp, Artificial Sequence
  source: /note="Description of Artificial Sequence: Synthetic primer"
gcttggctacagcacctctga

SEQ ID NO: 2019 - DNA, 21 bp, Artificial Sequence
  source: /note="Description of Artificial Sequence: Synthetic primer"
ggcatggggttgagatgtgct

SEQ ID NO: 2020 - DNA, 20 bp, Homo sapiens
tcagtgagatgagatatcaa

SEQ ID NO: 2021 - DNA, 20 bp, Homo sapiens
cagtgagatgagatatcaaa

SEQ ID NO: 2022 - DNA, 20 bp, Homo sapiens
tgtaactaataaataccagg

SEQ ID NO: 2023 - DNA, 20 bp, Homo sapiens
ttagggtgggggcgtgggtg

SEQ ID NO: 2024 - DNA, 20 bp, Homo sapiens
attagggtgggggcgtgggt

SEQ ID NO: 2025 - DNA, 20 bp, Homo sapiens
cacgcccccaccctaatcag

SEQ ID NO: 2026 - DNA, 20 bp, Homo sapiens
tctgattagggtgggggcgt

SEQ ID NO: 2027 - DNA, 20 bp, Homo sapiens
ttggcctctgattagggtgg

SEQ ID NO: 2028 - DNA, 20 bp, Homo sapiens
tttggcctctgattagggtg

SEQ ID NO: 2029 - DNA, 20 bp, Homo sapiens
gtttggcctctgattagggt

SEQ ID NO: 2030 - DNA, 20 bp, Homo sapiens
ggtttggcctctgattaggg

SEQ ID NO: 2031 - DNA, 20 bp, Homo sapiens
aagggtttggcctctgatta

SEQ ID NO: 2032 - DNA, 20 bp, Homo sapiens
gaagggtttggcctctgatt

SEQ ID NO: 2033 - DNA, 20 bp, Homo sapiens
atcagaggccaaacccttcc

SEQ ID NO: 2034 - DNA, 20 bp, Homo sapiens
cacaggctccaggaagggtt

SEQ ID NO: 2035 - DNA, 20 bp, Homo sapiens
tttatcacaggctccaggaa

SEQ ID NO: 2036 - DNA, 20 bp, Homo sapiens
ttttatcacaggctccagga

SEQ ID NO: 2037 - DNA, 20 bp, Homo sapiens
ttgcttttatcacaggctcc

SEQ ID NO: 2038 - DNA, 20 bp, Homo sapiens
ctaacagttgcttttatcac

SEQ ID NO: 2039 - DNA, 23 bp, Artificial Sequence
  source: /note="Description of Artificial Sequence: Synthetic oligonucleotide"
ctaacagttgcttttatcacagg

SEQ ID NO: 2040 - DNA, 45 bp, Artificial Sequence
  source: /note="Description of Artificial Sequence: Synthetic oligonucleotide"
tagtgcaagctaacaggctccaggaagggtttggcctctgattag

SEQ ID NO: 2041 - DNA, 61 bp, Artificial Sequence
  source: /note="Description of Artificial Sequence: Synthetic oligonucleotide"
tagtgcaagctaacagttgcttttattcacaggctccaggaagggtttggcctctgattag

SEQ ID NO: 2042 - DNA, 47 bp, Artificial Sequence
  source: /note="Description of Artificial Sequence: Synthetic oligonucleotide"
tagtgcaagctaacagttgctccaggaagggtttggcctctgattag

SEQ ID NO: 2043 - DNA, 58 bp, Artificial Sequence
  source: /note="Description of Artificial Sequence: Synthetic oligonucleotide"
tagtgcaagctaacagttgcttttatcaggctccaggaagggtttggcctctgattag

SEQ ID NO: 2044 - DNA, 59 bp, Artificial Sequence
  source: /note="Description of Artificial Sequence: Synthetic oligonucleotide"
tagtgcaagctaacagttgcttttacacaggctccaggaagggtttggcctctgattag

SEQ ID NO: 2045 - DNA, 58 bp, Artificial Sequence
  source: /note="Description of Artificial Sequence: Synthetic oligonucleotide"
tagtgcaagctaacagttgcttttcacaggctccaggaagggtttggcctctgattag

SEQ ID NO: 2046 - DNA, 37 bp, Artificial Sequence
  source: /note="Description of Artificial Sequence: Synthetic oligonucleotide"
tagtgcaagctccaggaagggtttggcctctgattag

SEQ ID NO: 2047 - DNA, 23 bp, Artificial Sequence
  source: /note="Description of Artificial Sequence: Synthetic oligonucleotide"
atcagaggccaaacccttccacc

SEQ ID NO: 2048 - DNA, 59 bp, Artificial Sequence
  source: /note="Description of Artificial Sequence: Synthetic oligonucleotide"
agctaacagttgcttttatcacaggctccaggagggtttggcctctgattagggtgggg

SEQ ID NO: 2049 - DNA, 55 bp, Artificial Sequence
  source: /note="Description of Artificial Sequence: Synthetic oligonucleotide"
agctaacagttgcttttatcacaggctccaggtttggcctctgattagggtgggg

SEQ ID NO: 2050 - DNA, 61 bp, Artificial Sequence
  source: /note="Description of Artificial Sequence: Synthetic oligonucleotide"
agctaacagttgcttttatcacaggctccaggaaagggtttggcctctgattagggtgggg

SEQ ID NO: 2051 - DNA, 56 bp, Artificial Sequence
  source: /note="Description of Artificial Sequence: Synthetic oligonucleotide"
agctaacagttgcttttatcacaggctccagggtttggcctctgattagggtgggg

SEQ ID NO: 2052 - DNA, 58 bp, Artificial Sequence
  source: /note="Description of Artificial Sequence: Synthetic oligonucleotide"
agctaacagttgcttttatcacaggctccaggaggtttggcctctgattagggtgggg

SEQ ID NO: 2053 - DNA, 59 bp, Artificial Sequence; identical to SEQ ID NO: 2048
  source: /note="Description of Artificial Sequence: Synthetic oligonucleotide"

SEQ ID NO: 2054 - DNA, 59 bp, Artificial Sequence
  source: /note="Description of Artificial Sequence: Synthetic oligonucleotide"
agctaacagttgcttttatcacaggctccaggaaggtttggcctctgattagggtgggg

SEQ ID NO: 2055 - DNA, 61 bp, Artificial Sequence; identical to SEQ ID NO: 2050
  source: /note="Description of Artificial Sequence: Synthetic oligonucleotide"

SEQ ID NO: 2056 - DNA, 58 bp, Artificial Sequence; identical to SEQ ID NO: 2052
  source: /note="Description of Artificial Sequence: Synthetic oligonucleotide"

SEQ ID NO: 2057 - DNA, 58 bp, Artificial Sequence
  source: /note="Description of Artificial Sequence: Synthetic oligonucleotide"
agctaacagttgcttttatcacaggctccaggaagtttggcctctgattagggtgggg

SEQ ID NO: 2058 - DNA, 50 bp, Artificial Sequence
  source: /note="Description of Artificial Sequence: Synthetic oligonucleotide"
agctaacagttgcttttatcacaggctccaggcctctgattagggtgggg

SEQ ID NO: 2059 - DNA, 43 bp, Artificial Sequence
  source: /note="Description of Artificial Sequence: Synthetic oligonucleotide"
agctaacagttgcttttatcacaggcctctgattagggtgggg

SEQ ID NO: 2060 - DNA, 57 bp, Artificial Sequence
  source: /note="Description of Artificial Sequence: Synthetic oligonucleotide"
agctaacagttgcttttatcacaggctccaggagtttggcctctgattagggtgggg

SEQ ID NO: 2061 - DNA, 23 bp, Artificial Sequence
  source: /note="Description of Artificial Sequence: Synthetic oligonucleotide"
ttgcttttatcacaggctccagg

SEQ ID NO: 2062 - DNA, 53 bp, Artificial Sequence
  source: /note="Description of Artificial Sequence: Synthetic oligonucleotide"
agctaacagttgcttttatcacaggaagggtttggcctctgattagggtgggg

SEQ ID NO: 2063 - DNA, 61 bp, Artificial Sequence
  source: /note="Description of Artificial Sequence: Synthetic oligonucleotide"
agctaacagttgcttttatcacaggcttccaggaagggtttggcctctgattagggtgggg

SEQ ID NO: 2064 - DNA, 52 bp, Artificial Sequence
  source: /note="Description of Artificial Sequence: Synthetic oligonucleotide"
agctaacagttgcttttatccaggaagggtttggcctctgattagggtgggg

SEQ ID NO: 2065 - DNA, 61 bp, Artificial Sequence
  source: /note="Description of Artificial Sequence: Synthetic oligonucleotide"
agctaacagttgcttttatcacaggcctccaggaagggtttggcctctgattagggtgggg

SEQ ID NO: 2066 - DNA, 59 bp, Artificial Sequence
  source: /note="Description of Artificial Sequence: Synthetic oligonucleotide"
agctaacagttgcttttatcacaggcccaggaagggtttggcctctgattagggtgggg

SEQ ID NO: 2067 - DNA, 58 bp, Artificial Sequence
  source: /note="Description of Artificial Sequence: Synthetic oligonucleotide"
agctaacagttgcttttatcacaggccaggaagggtttggcctctgattagggtgggg

SEQ ID NO: 2068 - DNA, 53 bp, Artificial Sequence; identical to SEQ ID NO: 2062
  source: /note="Description of Artificial Sequence: Synthetic oligonucleotide"

SEQ ID NO: 2069 - DNA, 61 bp, Artificial Sequence; identical to SEQ ID NO: 2063
  source: /note="Description of Artificial Sequence: Synthetic oligonucleotide"

SEQ ID NO: 2070 - DNA, 52 bp, Artificial Sequence; identical to SEQ ID NO: 2064
  source: /note="Description of Artificial Sequence: Synthetic oligonucleotide"

SEQ ID NO: 2071 - DNA, 61 bp, Artificial Sequence; identical to SEQ ID NO: 2065
  source: /note="Description of Artificial Sequence: Synthetic oligonucleotide"

SEQ ID NO: 2072 - DNA, 53 bp, Artificial Sequence; identical to SEQ ID NO: 2062
  source: /note="Description of Artificial Sequence: Synthetic oligonucleotide"

SEQ ID NO: 2073 - DNA, 52 bp, Artificial Sequence; identical to SEQ ID NO: 2064
  source: /note="Description of Artificial Sequence: Synthetic oligonucleotide"

SEQ ID NO: 2074 - DNA, 61 bp, Artificial Sequence; identical to SEQ ID NO: 2063
  source: /note="Description of Artificial Sequence: Synthetic oligonucleotide"

SEQ ID NO: 2075 - DNA, 23 bp, Artificial Sequence
  source: /note="Description of Artificial Sequence: Synthetic oligonucleotide"
agctaacagtgattagggtgggg

SEQ ID NO: 2076 - DNA, 59 bp, Artificial Sequence; identical to SEQ ID NO: 2066
  source: /note="Description of Artificial Sequence: Synthetic oligonucleotide"

SEQ ID NO: 2077 - DNA, 53 bp, Artificial Sequence; identical to SEQ ID NO: 2062
  source: /note="Description of Artificial Sequence: Synthetic oligonucleotide"

SEQ ID NO: 2078 - DNA, 52 bp, Artificial Sequence; identical to SEQ ID NO: 2064
  source: /note="Description of Artificial Sequence: Synthetic oligonucleotide"

SEQ ID NO: 2079 - DNA, 61 bp, Artificial Sequence; identical to SEQ ID NO: 2063
  source: /note="Description of Artificial Sequence: Synthetic oligonucleotide"

SEQ ID NO: 2080 - DNA, 61 bp, Artificial Sequence; identical to SEQ ID NO: 2065
  source: /note="Description of Artificial Sequence: Synthetic oligonucleotide"

SEQ ID NO: 2081 - DNA, 55 bp, Artificial Sequence
  source: /note="Description of Artificial Sequence: Synthetic oligonucleotide"
agctaacagttgcttttatcacaggcgaagggtttggcctctgattagggtgggg

SEQ ID NO: 2082 - DNA, 23 bp, Artificial Sequence
  source: /note="Description of Artificial Sequence: Synthetic oligonucleotide"
ttttatcacaggctccaggaagg

SEQ ID NO: 2083 - DNA, 61 bp, Artificial Sequence
  source: /note="Description of Artificial Sequence: Synthetic oligonucleotide"
aacagttgcttttatcacaggctccaaggaagggtttggcctctgattagggtgggggcgt

SEQ ID NO: 2084 - DNA, 43 bp, Artificial Sequence
  source: /note="Description of Artificial Sequence: Synthetic oligonucleotide"
aacagttgcttttatcacaggcctctgattagggtgggggcgt

SEQ ID NO: 2085 - DNA, 49 bp, Artificial Sequence
  source: /note="Description of Artificial Sequence: Synthetic oligonucleotide"
aacagttgcttttatcacagggtttggcctctgattagggtgggggcgt

SEQ ID NO: 2086 - DNA, 53 bp, Artificial Sequence
  source: /note="Description of Artificial Sequence: Synthetic oligonucleotide"
aacagttgcttttatcacaggaagggtttggcctctgattagggtgggggcgt

SEQ ID NO: 2087 - DNA, 24 bp, Artificial Sequence
  source: /note="Description of Artificial Sequence: Synthetic oligonucleotide"
aacagttgcttttggtgggggcgt

SEQ ID NO: 2088 - DNA, 61 bp, Artificial Sequence; identical to SEQ ID NO: 2083
  source: /note="Description of Artificial Sequence: Synthetic oligonucleotide"

SEQ ID NO: 2089 - DNA, 49 bp, Artificial Sequence; identical to SEQ ID NO: 2085
  source: /note="Description of Artificial Sequence: Synthetic oligonucleotide"

SEQ ID NO: 2090 - DNA, 53 bp, Artificial Sequence; identical to SEQ ID NO: 2086
  source: /note="Description of Artificial Sequence: Synthetic oligonucleotide"

SEQ ID NO: 2091 - DNA, 43 bp, Artificial Sequence; identical to SEQ ID NO: 2084
  source: /note="Description of Artificial Sequence: Synthetic oligonucleotide"

SEQ ID NO: 2092 - DNA, 48 bp, Artificial Sequence
  source: /note="Description of Artificial Sequence: Synthetic oligonucleotide"
aacagttgcttttatcacaggcttggcctctgattagggtgggggcgt

SEQ ID NO: 2093 - DNA, 59 bp, Artificial Sequence
  source: /note="Description of Artificial Sequence: Synthetic oligonucleotide"
aacagttgcttttatcacaggctccggaagggtttggcctctgattagggtgggggcgt

SEQ ID NO: 2094 - DNA, 23 bp, Artificial Sequence
  source: /note="Description of Artificial Sequence: Synthetic oligonucleotide"
tttatcacaggctccaggaaggg

SEQ ID NO: 2095 - DNA, 59 bp, Artificial Sequence
  source: /note="Description of Artificial Sequence: Synthetic oligonucleotide"
acagttgcttttatcacaggctccagaagggtttggcctctgattagggtgggggcgtg

SEQ ID NO: 2096 - DNA, 49 bp, Artificial Sequence
  source: /note="Description of Artificial Sequence: Synthetic oligonucleotide"
acagttgcttttatcacagggtttggcctctgattagggtgggggcgtg

SEQ ID NO: 2097 - DNA, 61 bp, Artificial Sequence
  source: /note="Description of Artificial Sequence: Synthetic oligonucleotide"
acagttgcttttatcacaggctccagggaagggtttggcctctgattagggtgggggcgtg

SEQ ID NO: 2098 - DNA, 43 bp, Artificial Sequence
  source: /note="Description of Artificial Sequence: Synthetic oligonucleotide"
acagttgcttttatcacaggcctctgattagggtgggggcgtg

SEQ ID NO: 2099 - DNA, 21 bp, Artificial Sequence
  source: /note="Description of Artificial Sequence: Synthetic oligonucleotide"
acagttgcttttgggggcgtg

SEQ ID NO: 2100 - DNA, 20 bp, Artificial Sequence
  source: /note="Description of Artificial Sequence: Synthetic oligonucleotide"
acagttgctttgggggcgtg

SEQ ID NO: 2101 - DNA, 59 bp, Artificial Sequence; identical to SEQ ID NO: 2095
  source: /note="Description of Artificial Sequence: Synthetic oligonucleotide"

SEQ ID NO: 2102 - DNA, 49 bp, Artificial Sequence; identical to SEQ ID NO: 2096
  source: /note="Description of Artificial Sequence: Synthetic oligonucleotide"

SEQ ID NO: 2103 - DNA, 61 bp, Artificial Sequence; identical to SEQ ID NO: 2097
  source: /note="Description of Artificial Sequence: Synthetic oligonucleotide"

SEQ ID NO: 2104 - DNA, 42 bp, Artificial Sequence
  source: /note="Description of Artificial Sequence: Synthetic oligonucleotide"
acagttgcttttatcacaggctccagataaggtgggggcgtg

SEQ ID NO: 2105 - DNA, 43 bp, Artificial Sequence; identical to SEQ ID NO: 2098
  source: /note="Description of Artificial Sequence: Synthetic oligonucleotide"

SEQ ID NO: 2106 - DNA, 56 bp, Artificial Sequence
  source: /note="Description of Artificial Sequence: Synthetic oligonucleotide"
acagttgcttttatcacaggctccagggtttggcctctgattagggtgggggcgtg

SEQ ID NO: 2107 - DNA, 61 bp, Artificial Sequence
  source: /note="Description of Artificial Sequence: Synthetic oligonucleotide"
acagttgcttttatcacaggctccagcgaagggtttggcctctgattagggtgggggcgtg

SEQ ID NO: 2108 - DNA, 59 bp, Artificial Sequence
  source: /note="Description of Artificial Sequence: Synthetic oligonucleotide"
acagttgcttttatcacaggctccggaagggtttggcctctgattagggtgggggcgtg

SEQ ID NO: 2109 - DNA, 23 bp, Artificial Sequence
  source: /note="Description of Artificial Sequence: Synthetic oligonucleotide"
cacaggctccaggaagggtttgg

SEQ ID NO: 2110 - DNA, 59 bp, Artificial Sequence
  source: /note="Description of Artificial Sequence: Synthetic oligonucleotide"
tgcttttatcacaggctccaggaaggtttggcctctgattagggtgggggcgtgggtgg

SEQ ID NO: 2111 - DNA, 31 bp, Artificial Sequence
  source: /note="Description of Artificial Sequence: Synthetic oligonucleotide"
tgcttttatcacaggcctggggcgtgggtgg

SEQ ID NO: 2112 - DNA, 24 bp, Artificial Sequence
  source: /note="Description of Artificial Sequence: Synthetic oligonucleotide"
tgcttttatcacaggcgtgggtgg

SEQ ID NO: 2113 - DNA, 43 bp, Artificial Sequence
  source: /note="Description of Artificial Sequence: Synthetic oligonucleotide"
tgcttttatcacaggcctctgattagggtgggggcgtgggtgg

SEQ ID NO: 2114 - DNA, 54 bp, Artificial Sequence
  source: /note="Description of Artificial Sequence: Synthetic oligonucleotide"
tgcttttatcacaggctccaggaaggcctctgattagggtgggggcgtgggtgg

SEQ ID NO: 2115 - DNA, 59 bp, Artificial Sequence
  source: /note="Description of Artificial Sequence: Synthetic oligonucleotide"
tgcttttatcacaggctccaggagggtttggcctctgattagggtgggggcgtgggtgg

SEQ ID NO: 2116 - DNA, 59 bp, Artificial Sequence; identical to SEQ ID NO: 2110
  source: /note="Description of Artificial Sequence: Synthetic oligonucleotide"

SEQ ID NO: 2117 - DNA, 43 bp, Artificial Sequence; identical to SEQ ID NO: 2113
  source: /note="Description of Artificial Sequence: Synthetic oligonucleotide"

SEQ ID NO: 2118 - DNA, 61 bp, Artificial Sequence
  source: /note="Description of Artificial Sequence: Synthetic oligonucleotide"
tgcttttatcacaggctccaggaaagggtttggcctctgattagggtgggggcgtgggtgg

SEQ ID NO: 2119 - DNA, 32 bp, Artificial Sequence
  source: /note="Description of Artificial Sequence: Synthetic oligonucleotide"
tgcttttatcacaggctccagggcgtgggtgg

SEQ ID NO: 2120 - DNA, 55 bp, Artificial Sequence
  source: /note="Description of Artificial Sequence: Synthetic oligonucleotide"
tgcttttatcacaggctccaggtttggcctctgattagggtgggggcgtgggtgg

SEQ ID NO: 2121 - DNA, 24 bp, Artificial Sequence
  source: /note="Description of Artificial Sequence: Synthetic oligonucleotide"
tgcttttatcacaggcgtgggtgg

SEQ ID NO: 2122 - DNA, 58 bp, Artificial Sequence
  source: /note="Description of Artificial Sequence: Synthetic oligonucleotide"
tgcttttatcacaggctccaggaagtttggcctctgattagggtgggggcgtgggtgg

SEQ ID NO: 2123 - DNA, 43 bp, Artificial Sequence
  source: /note="Description of Artificial Sequence: Synthetic oligonucleotide"
tgcttttatcacaggctccaggaaggtccgtttgcgtgggtgg

SEQ ID NO: 2124 - DNA, 23 bp, Artificial Sequence
  source: /note="Description of Artificial Sequence: Synthetic oligonucleotide"
cacgcccccaccctaatcagagg

SEQ ID NO: 2125 - DNA, 41 bp, Artificial Sequence
  source: /note="Description of Artificial Sequence: Synthetic oligonucleotide"
tatcacaggctccaggaagggtttggcgtgggtggggtaga

SEQ ID NO: 2126 - DNA, 61 bp, Artificial Sequence
  source: /note="Description of Artificial Sequence: Synthetic oligonucleotide"
tatcacaggctccaggaagggtttggcctctgaattagggtgggggcgtgggtggggtaga

SEQ ID NO: 2127 - DNA, 36 bp, Artificial Sequence
  source: /note="Description of Artificial Sequence: Synthetic oligonucleotide"
tatcacaggctccaggaagggcgtgggtggggtaga

SEQ ID NO: 2128 - DNA, 38 bp, Artificial Sequence
  source: /note="Description of Artificial Sequence: Synthetic oligonucleotide"
tatcacaggctccaggaagggggcgtgggtggggtaga

SEQ ID NO: 2129 - DNA, 42 bp, Artificial Sequence
  source: /note="Description of Artificial Sequence: Synthetic oligonucleotide"
tatcacaggctccaggaagggtttgggcgtgggtggggtaga

SEQ ID NO: 2130 - DNA, 36 bp, Artificial Sequence
  source: /note="Description of Artificial Sequence: Synthetic oligonucleotide"
tatcacaggctccaggaagggtttgggtggggtaga

SEQ ID NO: 2131 - DNA, 33 bp, Artificial Sequence
  source: /note="Description of Artificial Sequence: Synthetic oligonucleotide"
tatcacaggctccaggggcgtgggtggggtaga

SEQ ID NO: 2132 - DNA, 23 bp, Artificial Sequence
  source: /note="Description of Artificial Sequence: Synthetic oligonucleotide"
gaagggtttggcctctgattagg

SEQ ID NO: 2133 - DNA, 41 bp, Artificial Sequence
  source: /note="Description of Artificial Sequence: Synthetic oligonucleotide"
aggctccaggaagggtttggcgtgggtggggtagaagagga

SEQ ID NO: 2134 - DNA, 42 bp, Artificial Sequence
  source: /note="Description of Artificial Sequence: Synthetic oligonucleotide"
aggctccaggaagggtttgggcgtgggtggggtagaagagga

SEQ ID NO: 2135 - DNA, 33 bp, Artificial Sequence
  source: /note="Description of Artificial Sequence: Synthetic oligonucleotide"
aggctccaggggcgtgggtggggtagaagagga

SEQ ID NO: 2136 - DNA, 30 bp, Artificial Sequence
  source: /note="Description of Artificial Sequence: Synthetic oligonucleotide"
aggctccaggaagggtggggtagaagagga

SEQ ID NO: 2137 - DNA, 48 bp, Artificial Sequence
  source: /note="Description of Artificial Sequence: Synthetic oligonucleotide"
aggctccaggaagggtttggcctctggcgtgggtggggtagaagagga

SEQ ID NO: 2138 - DNA, 36 bp, Artificial Sequence
  source: /note="Description of Artificial Sequence: Synthetic oligonucleotide"
aggctccaggaagggcgtgggtggggtagaagagga

SEQ ID NO: 2139 - DNA, 38 bp, Artificial Sequence
  source: /note="Description of Artificial Sequence: Synthetic oligonucleotide"
aggctccaggaagggtttggcctctgcgtagaagagga

SEQ ID NO: 2140 - DNA, 35 bp, Artificial Sequence
  source: /note="Description of Artificial Sequence: Synthetic oligonucleotide"
aggctccaggaagggttgggtggggtagaagagga

SEQ ID NO: 2141 - DNA, 41 bp, Artificial Sequence; identical to SEQ ID NO: 2133
  source: /note="Description of Artificial Sequence: Synthetic oligonucleotide"

SEQ ID NO: 2142 - DNA, 42 bp, Artificial Sequence; identical to SEQ ID NO: 2134
  source: /note="Description of Artificial Sequence: Synthetic oligonucleotide"

SEQ ID NO: 2143 - DNA, 30 bp, Artificial Sequence; identical to SEQ ID NO: 2136
  source: /note="Description of Artificial Sequence: Synthetic oligonucleotide"

SEQ ID NO: 2144 - DNA, 32 bp, Artificial Sequence
  source: /note="Description of Artificial Sequence: Synthetic oligonucleotide"
aggctccaggaagggtttggggtagaagagga

SEQ ID NO: 2145 - DNA, 38 bp, Artificial Sequence
  source: /note="Description of Artificial Sequence: Synthetic oligonucleotide"
aggctccaggaagggggcgtgggtggggtagaagagga

SEQ ID NO: 2146 - DNA, 31 bp, Artificial Sequence
  source: /note="Description of Artificial Sequence: Synthetic oligonucleotide"
aggctccaggcgtgggtggggtagaagagga

SEQ ID NO: 2147 - DNA, 36 bp, Artificial Sequence; identical to SEQ ID NO: 2138
  source: /note="Description of Artificial Sequence: Synthetic oligonucleotide"

SEQ ID NO: 2148 - DNA, 21 bp, Artificial Sequence
  source: /note="Description of Artificial Sequence: Synthetic oligonucleotide"
aggctccagggtagaagagga

SEQ ID NO: 2149 - DNA, 36 bp, Artificial Sequence
  source: /note="Description of Artificial Sequence: Synthetic oligonucleotide"
aggctccaggaagggtttgggtggggtagaagagga

SEQ ID NO: 2150 - DNA, 23 bp, Artificial Sequence
  source: /note="Description of Artificial Sequence: Synthetic oligonucleotide"
aagggtttggcctctgattaggg

SEQ ID NO: 2151 - DNA, 64 bp, Artificial Sequence
  source: /note="Description of Artificial Sequence: Synthetic oligonucleotide"
ggctccaggaagggtttggcctctgattccccattgtgggggcgtgggtggggtagaagaggac

SEQ ID NO: 2152 - DNA, 35 bp, Artificial Sequence
  source: /note="Description of Artificial Sequence: Synthetic oligonucleotide"
ggctccaggaagggtttggtggggtagaagaggac

SEQ ID NO: 2153 - DNA, 41 bp, Artificial Sequence
  source: /note="Description of Artificial Sequence: Synthetic oligonucleotide"
ggctccaggaagggtttggcgtgggtggggtagaagaggac

SEQ ID NO: 2154 - DNA, 36 bp, Artificial Sequence
  source: /note="Description of Artificial Sequence: Synthetic oligonucleotide"
ggctccaggaagggcgtgggtggggtagaagaggac

SEQ ID NO: 2155 - DNA, 36 bp, Artificial Sequence
  source: /note="Description of Artificial Sequence: Synthetic oligonucleotide"
ggctccaggaagggtttgggtggggtagaagaggac

SEQ ID NO: 2156 - DNA, 51 bp, Artificial Sequence
  source: /note="Description of Artificial Sequence: Synthetic oligonucleotide"
ggctccaggaagggtttggcctctgagggcgtgggtggggtagaagaggac

SEQ ID NO: 2157 - DNA, 42 bp, Artificial Sequence
  source: /note="Description of Artificial Sequence: Synthetic oligonucleotide"
ggctccaggaagggtttggccgtgggtggggtagaagaggac

SEQ ID NO: 2158 - DNA, 61 bp, Artificial Sequence
  source: /note="Description of Artificial Sequence: Synthetic oligonucleotide"
ggctccaggaagggtttggcctctgaattagggtgggggcgtgggtggggtagaagaggac

SEQ ID NO: 2159 - DNA, 40 bp, Artificial Sequence
  source: /note="Description of Artificial Sequence: Synthetic oligonucleotide"
ggctccaggaagggtttgcgtgggtggggtagaagaggac

SEQ ID NO: 2160 - DNA, 32 bp, Artificial Sequence
  source: /note="Description of Artificial Sequence: Synthetic oligonucleotide"
ggctccaggaagggtttggggtagaagaggac

SEQ ID NO: 2161 - DNA, 34 bp, Artificial Sequence
  source: /note="Description of Artificial Sequence: Synthetic oligonucleotide"
ggctccaggaagggtgggtggggtagaagaggac

SEQ ID NO: 2162 - DNA, 23 bp, Artificial Sequence
  source: /note="Description of Artificial Sequence: Synthetic oligonucleotide"
ggtttggcctctgattagggtgg

SEQ ID NO: 2163 - DNA, 41 bp, Artificial Sequence
  source: /note="Description of Artificial Sequence: Synthetic oligonucleotide"
tccaggaagggtttggcgtgggtggggtagaagaggactgg

SEQ ID NO: 2164 - DNA, 30 bp, Artificial Sequence
  source: /note="Description of Artificial Sequence: Synthetic oligonucleotide"
tccaggaagggtggggtagaagaggactgg

SEQ ID NO: 2165 - DNA, 59 bp, Artificial Sequence
  source: /note="Description of Artificial Sequence: Synthetic oligonucleotide"
tccaggaagggtttggcctctgattaggtgggggcgtgggtggggtagaagaggactgg

SEQ ID NO: 2166 - DNA, 25 bp, Artificial Sequence
  source: /note="Description of Artificial Sequence: Synthetic oligonucleotide"
tccaggaagggtagaagaggactgg

SEQ ID NO: 2167 - DNA, 38 bp, Artificial Sequence
  source: /note="Description of Artificial Sequence: Synthetic oligonucleotide"
tccaggaagggggcgtgggtggggtagaagaggactgg

SEQ ID NO: 2168 - DNA, 36 bp, Artificial Sequence
  source: /note="Description of Artificial Sequence: Synthetic oligonucleotide"
tccaggaagggcgtgggtggggtagaagaggactgg

SEQ ID NO: 2169 - DNA, 36 bp, Artificial Sequence
  source: /note="Description of Artificial Sequence: Synthetic oligonucleotide"
tccaggaagggtttgggtggggtagaagaggactgg

SEQ ID NO: 2170 - DNA, 59 bp, Artificial Sequence
  source: /note="Description of Artificial Sequence: Synthetic oligonucleotide"
tccaggaagggtttggcctctgattgggtgggggcgtgggtggggtagaagaggactgg

SEQ ID NO: 2171 - DNA, 41 bp, Artificial Sequence; identical to SEQ ID NO: 2163
  source: /note="Description of Artificial Sequence: Synthetic oligonucleotide"

SEQ ID NO: 2172 - DNA, 38 bp, Artificial Sequence; identical to SEQ ID NO: 2167
  source: /note="Description of Artificial Sequence: Synthetic oligonucleotide"

SEQ ID NO: 2173 - DNA, 36 bp, Artificial Sequence; identical to SEQ ID NO: 2169
  source: /note="Description of Artificial Sequence: Synthetic oligonucleotide"

SEQ ID NO: 2174 - DNA, 59 bp, Artificial Sequence; identical to SEQ ID NO: 2165
  source: /note="Description of Artificial Sequence: Synthetic oligonucleotide"

SEQ ID NO: 2175 - DNA, 31 bp, Artificial Sequence
  source: /note="Description of Artificial Sequence: Synthetic oligonucleotide"
tccaggaagggttggggtagaagaggactgg

SEQ ID NO: 2176 - DNA, 41 bp, Artificial Sequence
  source: /note="Description of Artificial Sequence: Synthetic oligonucleotide"
tccaggaagggtttggcctgggtggggtagaagaggactgg

SEQ ID NO: 2177 - DNA, 30 bp, Artificial Sequence
  source: /note="Description of Artificial Sequence: Synthetic oligonucleotide"
tccaggaagggtttggtagaagaggactgg

SEQ ID NO: 2178 - DNA, 23 bp, Artificial Sequence
  source: /note="Description of Artificial Sequence: Synthetic oligonucleotide"
gtttggcctctgattagggtggg

SEQ ID NO: 2179 - DNA, 59 bp, Artificial Sequence
  source: /note="Description of Artificial Sequence: Synthetic oligonucleotide"
ccaggaagggtttggcctctgattaggtgggggcgtgggtggggtagaagaggactggc

SEQ ID NO: 2180 - DNA, 41 bp, Artificial Sequence
  source: /note="Description of Artificial Sequence: Synthetic oligonucleotide"
ccaggaagggtttggcgtgggtggggtagaagaggactggc

SEQ ID NO: 2181 - DNA, 58 bp, Artificial Sequence
  source: /note="Description of Artificial Sequence: Synthetic oligonucleotide"
ccaggaagggtttggcctctgattggtgggggcgtgggtggggtagaagaggactggc

SEQ ID NO: 2182 - DNA, 36 bp, Artificial Sequence
  source: /note="Description of Artificial Sequence: Synthetic oligonucleotide"
ccaggaagggcgtgggtggggtagaagaggactggc

SEQ ID NO: 2183 - DNA, 38 bp, Artificial Sequence
  source: /note="Description of Artificial Sequence: Synthetic oligonucleotide"
ccaggaagggggcgtgggtggggtagaagaggactggc

SEQ ID NO: 2184 - DNA, 36 bp, Artificial Sequence
  source: /note="Description of Artificial Sequence: Synthetic oligonucleotide"
ccaggaagggtttgggtggggtagaagaggactggc

SEQ ID NO: 2185 - DNA, 56 bp, Artificial Sequence
  source: /note="Description of Artificial Sequence: Synthetic oligonucleotide"
ccaggaagggtttggcctctgaggtgggggcgtgggtggggtagaagaggactggc

SEQ ID NO: 2186 - DNA, 59 bp, Artificial Sequence; identical to SEQ ID NO: 2179
  source: /note="Description of Artificial Sequence: Synthetic oligonucleotide"

SEQ ID NO: 2187 - DNA, 41 bp, Artificial Sequence; identical to SEQ ID NO: 2180
  source: /note="Description of Artificial Sequence: Synthetic oligonucleotide"

SEQ ID NO: 2188 - DNA, 36 bp, Artificial Sequence; identical to SEQ ID NO: 2184
  source: /note="Description of Artificial Sequence: Synthetic oligonucleotide"

SEQ ID NO: 2189 - DNA, 58 bp, Artificial Sequence; identical to SEQ ID NO: 2181
  source: /note="Description of Artificial Sequence: Synthetic oligonucleotide"

SEQ ID NO: 2190 - DNA, 55 bp, Artificial Sequence
  source: /note="Description of Artificial Sequence: Synthetic oligonucleotide"
ccaggaagggtttggcctctgattaggggcgtgggtggggtagaagaggactggc

SEQ ID NO: 2191 - DNA, 36 bp, Artificial Sequence; identical to SEQ ID NO: 2182
  source: /note="Description of Artificial Sequence: Synthetic oligonucleotide"

SEQ ID NO: 2192 - DNA, 61 bp, Artificial Sequence
  source: /note="Description of Artificial Sequence: Synthetic oligonucleotide"
ccaggaagggtttggcctctgattagaggtgggggcgtgggtggggtagaagaggactggc

SEQ ID NO: 2193 - DNA, 59 bp, Artificial Sequence; identical to SEQ ID NO: 2179
  source: /note="Description of Artificial Sequence: Synthetic oligonucleotide"

SEQ ID NO: 2194 - DNA, 58 bp, Artificial Sequence; identical to SEQ ID NO: 2181
  source: /note="Description of Artificial Sequence: Synthetic oligonucleotide"

SEQ ID NO: 2195 - DNA, 36 bp, Artificial Sequence; identical to SEQ ID NO: 2184
  source: /note="Description of Artificial Sequence: Synthetic oligonucleotide"

SEQ ID NO: 2196 - DNA, 41 bp, Artificial Sequence; identical to SEQ ID NO: 2180
  source: /note="Description of Artificial Sequence: Synthetic oligonucleotide"

SEQ ID NO: 2197 - DNA, 44 bp, Artificial Sequence
  source: /note="Description of Artificial Sequence: Synthetic oligonucleotide"
ccaggaagggtttgggggcgtgggtggggtagaagaggactggc

SEQ ID NO: 2198 - DNA, 58 bp, Artificial Sequence
  source: /note="Description of Artificial Sequence: Synthetic oligonucleotide"
ccaggaagggtttggcctctgattagtgggggcgtgggtggggtagaagaggactggc

SEQ ID NO: 2199 - DNA, 36 bp, Artificial Sequence; identical to SEQ ID NO: 2182
  source: /note="Description of Artificial Sequence: Synthetic oligonucleotide"

SEQ ID NO: 2200 - DNA, 59 bp, Artificial Sequence; identical to SEQ ID NO: 2179
  source: /note="Description of Artificial Sequence: Synthetic oligonucleotide"

SEQ ID NO: 2201 - DNA, 41 bp, Artificial Sequence; identical to SEQ ID NO: 2180
  source: /note="Description of Artificial Sequence: Synthetic oligonucleotide"

SEQ ID NO: 2202 - DNA, 58 bp, Artificial Sequence; identical to SEQ ID NO: 2181
  source: /note="Description of Artificial Sequence: Synthetic oligonucleotide"

SEQ ID NO: 2203 - DNA, 37 bp, Artificial Sequence
  source: /note="Description of Artificial Sequence: Synthetic oligonucleotide"
ccaggaaggggcgtgggtggggtagaagaggactggc

SEQ ID NO: 2204 - DNA, 36 bp, Artificial Sequence; identical to SEQ ID NO: 2182
  source: /note="Description of Artificial Sequence: Synthetic oligonucleotide"

SEQ ID NO: 2205 - DNA, 58 bp, Artificial Sequence; identical to SEQ ID NO: 2198
  source: /note="Description of Artificial Sequence: Synthetic oligonucleotide"

SEQ ID NO: 2206 - DNA, 44 bp, Artificial Sequence; identical to SEQ ID NO: 2197
  source: /note="Description of Artificial Sequence: Synthetic oligonucleotide"

SEQ ID NO: 2207 - DNA, 23 bp, Artificial Sequence
  source: /note="Description of Artificial Sequence: Synthetic oligonucleotide"
tttggcctctgattagggtgggg

SEQ ID NO: 2208 - DNA, 59 bp, Artificial Sequence
  source: /note="Description of Artificial Sequence: Synthetic oligonucleotide"
caggaagggtttggcctctgattaggtgggggcgtgggtggggtagaagaggactggca

SEQ ID NO: 2209 - DNA, 41 bp, Artificial Sequence
  source: /note="Description of Artificial Sequence: Synthetic oligonucleotide"
caggaagggtttggcgtgggtggggtagaagaggactggca

SEQ ID NO: 2210 - DNA, 58 bp, Artificial Sequence
  source: /note="Description of Artificial Sequence: Synthetic oligonucleotide"
caggaagggtttggcctctgattagtgggggcgtgggtggggtagaagaggactggca

SEQ ID NO: 2211 - DNA, 55 bp, Artificial Sequence
  source: /note="Description of Artificial Sequence: Synthetic oligonucleotide"
caggaagggtttggcctctgattaggggcgtgggtggggtagaagaggactggca

SEQ ID NO: 2212 - DNA, 36 bp, Artificial Sequence
  source: /note="Description of Artificial Sequence: Synthetic oligonucleotide"
caggaagggtttgggtggggtagaagaggactggca

SEQ ID NO: 2213 - DNA, 47 bp, Artificial Sequence
  source: /note="Description of Artificial Sequence: Synthetic oligonucleotide"
caggaagggtttggtgggggcgtgggtggggtagaagaggactggca

SEQ ID NO: 2214 - DNA, 53 bp, Artificial Sequence
  source: /note="Description of Artificial Sequence: Synthetic oligonucleotide"
caggaagggtttggcctctgtgggggcgtgggtggggtagaagaggactggca

SEQ ID NO: 2215 - DNA, 30 bp, Artificial Sequence
  source: /note="Description of Artificial Sequence: Synthetic oligonucleotide"
caggaagggtggggtagaagaggactggca

SEQ ID NO: 2216 - DNA, 59 bp, Artificial Sequence; identical to SEQ ID NO: 2208
  source: /note="Description of Artificial Sequence: Synthetic oligonucleotide"

SEQ ID NO: 2217 - DNA, 41 bp, Artificial Sequence; identical to SEQ ID NO: 2209
  source: /note="Description of Artificial Sequence: Synthetic oligonucleotide"

SEQ ID NO: 2218 - DNA, 30 bp, Artificial Sequence; identical to SEQ ID NO: 2215
  source: /note="Description of Artificial Sequence: Synthetic oligonucleotide"

SEQ ID NO: 2219 - DNA, 58 bp, Artificial Sequence; identical to SEQ ID NO: 2210
  source: /note="Description of Artificial Sequence: Synthetic oligonucleotide"

SEQ ID NO: 2220 - DNA, 56 bp, Artificial Sequence
  source: /note="Description of Artificial Sequence: Synthetic oligonucleotide"
caggaagggtttggcctctgattagggggcgtgggtggggtagaagaggactggca

SEQ ID NO: 2221 - DNA, 55 bp, Artificial Sequence; identical to SEQ ID NO: 2211
  source: /note="Description of Artificial Sequence: Synthetic oligonucleotide"

SEQ ID NO: 2222 - DNA, 59 bp, Artificial Sequence; identical to SEQ ID NO: 2208
  source: /note="Description of Artificial Sequence: Synthetic oligonucleotide"

SEQ ID NO: 2223 - DNA, 58 bp, Artificial Sequence; identical to SEQ ID NO: 2210
  source: /note="Description of Artificial Sequence: Synthetic oligonucleotide"

SEQ ID NO: 2224 - DNA, 30 bp, Artificial Sequence
  source: /note="Description of Artificial Sequence: Synthetic oligonucleotide"
caggaagggtttggcctaagaggactggca

SEQ ID NO: 2225 - DNA, 25 bp, Artificial Sequence
  source: /note="Description of Artificial Sequence: Synthetic oligonucleotide"
caggaagggtttgggaggactggca

SEQ ID NO: 2226 - DNA, 27 bp, Artificial Sequence
  source: /note="Description of Artificial Sequence: Synthetic oligonucleotide"
caggaagggtttagaagaggactggca

SEQ ID NO: 2227 - DNA, 29 bp, Artificial Sequence
  source: /note="Description of Artificial Sequence: Synthetic oligonucleotide"
caggaagggtttggcctcgaggactggca

SEQ ID NO: 2228 - DNA, 56 bp, Artificial Sequence; identical to SEQ ID NO: 2220
  source: /note="Description of Artificial Sequence: Synthetic oligonucleotide"

SEQ ID NO: 2229 - DNA, 57 bp, Artificial Sequence
  source: /note="Description of Artificial Sequence: Synthetic oligonucleotide"
caggaagggtttggcctctgattaggggggcgtgggtggggtagaagaggactggca

SEQ ID NO: 2230 - DNA, 59 bp, Artificial Sequence; identical to SEQ ID NO: 2208
  source: /note="Description of Artificial Sequence: Synthetic oligonucleotide"

SEQ ID NO: 2231 - DNA, 41 bp, Artificial Sequence; identical to SEQ ID NO: 2209
  source: /note="Description of Artificial Sequence: Synthetic oligonucleotide"

SEQ ID NO: 2232 - DNA, 58 bp, Artificial Sequence; identical to SEQ ID NO: 2210
  source: /note="Description of Artificial Sequence: Synthetic oligonucleotide"

SEQ ID NO: 2233 - DNA, 32 bp, Artificial Sequence
  source: /note="Description of Artificial Sequence: Synthetic oligonucleotide"
caggaagggtttggggtagaagaggactggca

SEQ ID NO: 2234 - DNA, 55 bp, Artificial Sequence; identical to SEQ ID NO: 2211
  source: /note="Description of Artificial Sequence: Synthetic oligonucleotide"

SEQ ID NO: 2235 - DNA, 56 bp, Artificial Sequence; identical to SEQ ID NO: 2220
  source: /note="Description of Artificial Sequence: Synthetic oligonucleotide"

SEQ ID NO: 2236 - DNA, 44 bp, Artificial Sequence
  source: /note="Description of Artificial Sequence: Synthetic oligonucleotide"
caggaagggtttgggggcgtgggtggggtagaagaggactggca

SEQ ID NO: 2237 - DNA, 23 bp, Artificial Sequence
  source: /note="Description of Artificial Sequence: Synthetic oligonucleotide"
ttggcctctgattagggtggggg

SEQ ID NO: 2238 - DNA, 56 bp, Artificial Sequence
  source: /note="Description of Artificial Sequence: Synthetic oligonucleotide"
aggaagggtttggcctctgattagggggcgtgggtggggtagaagaggactggcag

SEQ ID NO: 2239 - DNA, 54 bp, Artificial Sequence
  source: /note="Description of Artificial Sequence: Synthetic oligonucleotide"
aggaagggtttggcctctgattagggcgtgggtggggtagaagaggactggcag

SEQ ID NO: 2240 - DNA, 55 bp, Artificial Sequence
  source: /note="Description of Artificial Sequence: Synthetic oligonucleotide"
aggaagggtttggcctctgattaggggcgtgggtggggtagaagaggactggcag

SEQ ID NO: 2241 - DNA, 59 bp, Artificial Sequence
  source: /note="Description of Artificial Sequence: Synthetic oligonucleotide"
aggaagggtttggcctctgattaggtgggggcgtgggtggggtagaagaggactggcag

SEQ ID NO: 2242 - DNA, 58 bp, Artificial Sequence
  source: /note="Description of Artificial Sequence: Synthetic oligonucleotide"
aggaagggtttggcctctgattagtgggggcgtgggtggggtagaagaggactggcag

SEQ ID NO: 2243 - DNA, 55 bp, Artificial Sequence
  source: /note="Description of Artificial Sequence: Synthetic oligonucleotide"
aggaagggtttggcctctgattgggggcgtgggtggggtagaagaggactggcag

SEQ ID NO: 2244 - DNA, 59 bp, Artificial Sequence
  source: /note="Description of Artificial Sequence: Synthetic oligonucleotide"
aggaagggtttggcctctgattagggtgggggcgtgggtgggtagaagaggactggcag

SEQ ID NO: 2245 - DNA, 23 bp, Artificial Sequence
  source: /note="Description of Artificial Sequence: Synthetic oligonucleotide"
tctgattagggtgggggcgtggg

SEQ ID NO: 2246 - DNA, 48 bp, Artificial Sequence
  source: /note="Description of Artificial Sequence: Synthetic oligonucleotide"
ggtttggcctctgattagggtggggtagaagaggactggcagacctct

SEQ ID NO: 2247 - DNA, 49 bp, Artificial Sequence
  source: /note="Description of Artificial Sequence: Synthetic oligonucleotide"
ggtttggcctctgattagggtgggggtagaagaggactggcagacctct

SEQ ID NO: 2248 - DNA, 52 bp, Artificial Sequence
  source: /note="Description of Artificial Sequence: Synthetic oligonucleotide"
ggtttggcctctgattagggtgggtggggtagaagaggactggcagacctct

SEQ ID NO: 2249 - DNA, 42 bp, Artificial Sequence
  source: /note="Description of Artificial Sequence: Synthetic oligonucleotide"
ggtttggcctctgatggggtagaagaggactggcagacctct

SEQ ID NO: 2250 - DNA, 31 bp, Artificial Sequence
  source: /note="Description of Artificial Sequence: Synthetic oligonucleotide"
ggtttggcctctgatttactggcagacctct

SEQ ID NO: 2251 - DNA, 53 bp, Artificial Sequence
  source: /note="Description of Artificial Sequence: Synthetic oligonucleotide"
ggtttggcctctgattggccgtgggtggggtagaagaggactggcagacctct

SEQ ID NO: 2252 - DNA, 44 bp, Artificial Sequence
  source: /note="Description of Artificial Sequence: Synthetic oligonucleotide"
ggtttggcctctgattaggggtagaagaggactggcagacctct

SEQ ID NO: 2253 - DNA, 58 bp, Artificial Sequence
  source: /note="Description of Artificial Sequence: Synthetic oligonucleotide"
ggtttggcctctgatccaagagcccgtgggtggggtagaagaggactggcagacctct

SEQ ID NO: 2254 - DNA, 59 bp, Artificial Sequence
  source: /note="Description of Artificial Sequence: Synthetic oligonucleotide"
ggtttggcctctgattagggtgggggcgtgggtgggtagaagaggactggcagacctct

SEQ ID NO: 2255 - DNA, 23 bp, Artificial Sequence
  source: /note="Description of Artificial Sequence: Synthetic oligonucleotide"
attagggtgggggcgtgggtggg

SEQ ID NO: 2256 - DNA, 48 bp, Artificial Sequence
  source: /note="Description of Artificial Sequence: Synthetic oligonucleotide"
tggcctctgattagggtggggtagaagaggactggcagacctctccat

SEQ ID NO: 2257 - DNA, 49 bp, Artificial Sequence
  source: /note="Description of Artificial Sequence: Synthetic oligonucleotide"
tggcctctgattagggtgggggtagaagaggactggcagacctctccat

SEQ ID NO: 2258 - DNA, 59 bp, Artificial Sequence
  source: /note="Description of Artificial Sequence: Synthetic oligonucleotide"
tggcctctgattagggtgggggcgtggtggggtagaagaggactggcagacctctccat

SEQ ID NO: 2259 - DNA, 48 bp, Artificial Sequence
  source: /note="Description of Artificial Sequence: Synthetic oligonucleotide"
tggcctctgattagggtgggggcgaagaggactggcagacctctccat

SEQ ID NO: 2260 - DNA, 23 bp, Artificial Sequence
  source: /note="Description of Artificial Sequence: Synthetic oligonucleotide"
ttagggtgggggcgtgggtgggg

SEQ ID NO: 2261 - DNA, 48 bp, Artificial Sequence
  source: /note="Description of Artificial Sequence: Synthetic oligonucleotide"
ggcctctgattagggtggggtagaagaggactggcagacctctccatc

SEQ ID NO: 2262 - DNA, 59 bp, Artificial Sequence
  source: /note="Description of Artificial Sequence: Synthetic oligonucleotide"
ggcctctgattagggtgggggcgtggtggggtagaagaggactggcagacctctccatc

SEQ ID NO: 2263 - DNA, 49 bp, Artificial Sequence
  source: /note="Description of Artificial Sequence: Synthetic oligonucleotide"
ggcctctgattagggtgggggtagaagaggactggcagacctctccatc

SEQ ID NO: 2264 - DNA, 20 bp, Artificial Sequence
  source: /note="Description of Artificial Sequence: Synthetic oligonucleotide"
tgtaactaataaataccagg

SEQ ID NO: 2265 - DNA, 59 bp, Artificial Sequence
  source: /note="Description of Artificial Sequence: Synthetic oligonucleotide"
ctgctgaggtgtaactaataaataccggaggcagcattttagttcacaagctcggagca

SEQ ID NO: 2266 - DNA, 59 bp, Artificial Sequence
  source: /note="Description of Artificial Sequence: Synthetic oligonucleotide"
ctgctgaggtgtaactaataaatacaggaggcagcattttagttcacaagctcggagca

SEQ ID NO: 2267 - DNA, 61 bp, Artificial Sequence
  source: /note="Description of Artificial Sequence: Synthetic oligonucleotide"
ctgctgaggtgtaactaataaatacccaggaggcagcattttagttcacaagctcggagca

SEQ ID NO: 2268 - DNA, 58 bp, Artificial Sequence
  source: /note="Description of Artificial Sequence: Synthetic oligonucleotide"
ctgctgaggtgtaactaataaataccgaggcagcattttagttcacaagctcggagca

SEQ ID NO: 2269 - DNA, 58 bp, Artificial Sequence
  source: /note="Description of Artificial Sequence: Synthetic oligonucleotide"
ctgctgaggtgtaactaataaatcaggaggcagcattttagttcacaagctcggagca

SEQ ID NO: 2270 - DNA, 57 bp, Artificial Sequence
  source: /note="Description of Artificial Sequence: Synthetic oligonucleotide"
ctgctgaggtgtaactaataaataggaggcagcattttagttcacaagctcggagca

SEQ ID NO: 2271 - DNA, 23 bp, Artificial Sequence
  source: /note="Description of Artificial Sequence: Synthetic oligonucleotide"
cagtgagatgagatatcaaaggg

SEQ ID NO: 2272 - DNA, 61 bp, Artificial Sequence
  source: /note="Description of Artificial Sequence: Synthetic oligonucleotide"
gggagatggaatgaacacttttcgtcccctttggatatctcatctcactgagctctgggcc

SEQ ID NO: 2273 - DNA, 58 bp, Artificial Sequence
  source: /note="Description of Artificial Sequence: Synthetic oligonucleotide"
gggagatggaatgaacacttttcgtcccctttgatctcatctcactgagctctgggcc

SEQ ID NO: 2274 - DNA, 54 bp, Artificial Sequence
  source: /note="Description of Artificial Sequence: Synthetic oligonucleotide"
gggagatggaatgaacacttttcgtcccctttgcatctcactgagctctgggcc

SEQ ID NO: 2275 - DNA, 55 bp, Artificial Sequence
  source: /note="Description of Artificial Sequence: Synthetic oligonucleotide"
gggagatggaatgaacacttttcgtcccctttctcatctcactgagctctgggcc

SEQ ID NO: 2276 - DNA, 59 bp, Artificial Sequence
  source: /note="Description of Artificial Sequence: Synthetic oligonucleotide"
gggagatggaatgaacacttttcgtcccctttatatctcatctcactgagctctgggcc

SEQ ID NO: 2277 - DNA, 57 bp, Artificial Sequence
  source: /note="Description of Artificial Sequence: Synthetic oligonucleotide"
gggagatggaatgaacacttttcgtcccctttgtctcatctcactgagctctgggcc

SEQ ID NO: 2278 - DNA, 58 bp, Artificial Sequence
  source: /note="Description of Artificial Sequence: Synthetic oligonucleotide"
gggagatggaatgaacacttttcgtccccttttatctcatctcactgagctctgggcc

SEQ ID NO: 2279 - DNA, 59 bp, Artificial Sequence
  source: /note="Description of Artificial Sequence: Synthetic oligonucleotide"
gggagatggaatgaacacttttcgtcccctttgtatctcatctcactgagctctgggcc

SEQ ID NO: 2280 - DNA, 23 bp, Artificial Sequence
  source: /note="Description of Artificial Sequence: Synthetic oligonucleotide"
tcagtgagatgagatatcaaagg

SEQ ID NO: 2281 - DNA, 61 bp, Artificial Sequence
  source: /note="Description of Artificial Sequence: Synthetic oligonucleotide"
ggagatggaatgaacacttttcgtcccctttgaatatctcatctcactgagctctgggccg

SEQ ID NO: 2282 - DNA, 59 bp, Artificial Sequence
  source: /note="Description of Artificial Sequence: Synthetic oligonucleotide"
ggagatggaatgaacacttttcgtcccctttgaatctcatctcactgagctctgggccg

SEQ ID NO: 2283 - DNA, 58 bp, Artificial Sequence
  source: /note="Description of Artificial Sequence: Synthetic oligonucleotide"
ggagatggaatgaacacttttcgtcccctttgatctcatctcactgagctctgggccg

SEQ ID NO: 2284 - DNA, 59 bp, Artificial Sequence
  source: /note="Description of Artificial Sequence: Synthetic oligonucleotide"
ggagatggaatgaacacttttcgtcccctttgtatctcatctcactgagctctgggccg

SEQ ID NO: 2285 - DNA, 58 bp, Artificial Sequence
  source: /note="Description of Artificial Sequence: Synthetic oligonucleotide"
ggagatggaatgaacacttttcgtccccttatatctcatctcactgagctctgggccg

SEQ ID NO: 2286 - DNA, 55 bp, Artificial Sequence
  source: /note="Description of Artificial Sequence: Synthetic oligonucleotide"
ggagatggaatgaacacttttcgtcccctttgacatctcactgagctctgggccg

SEQ ID NO: 2287 - DNA, 23 bp, Artificial Sequence
  source: /note="Description of Artificial Sequence: Synthetic oligonucleotide"
gtgccagatgaacttcccattgg

SEQ ID NO: 2288 - DNA, 59 bp, Artificial Sequence
  source: /note="Description of Artificial Sequence: Synthetic oligonucleotide"
ctgtgggcagtgccagatgaacttccattgggggacattcttatttttatcgagcacaa

SEQ ID NO: 2289 - DNA, 58 bp, Artificial Sequence
  source: /note="Description of Artificial Sequence: Synthetic oligonucleotide"
ctgtgggcagtgccagatgaacttcattgggggacattcttatttttatcgagcacaa

SEQ ID NO: 2290 - DNA, 61 bp, Artificial Sequence
  source: /note="Description of Artificial Sequence: Synthetic oligonucleotide"
ctgtgggcagtgccagatgaacttccccattgggggacattcttatttttatcgagcacaa

SEQ ID NO: 2291 - DNA, 55 bp, Artificial Sequence
  source: /note="Description of Artificial Sequence: Synthetic oligonucleotide"
ctgtgggcagtgccagatgaacattgggggacattcttatttttatcgagcacaa

SEQ ID NO: 2292 - DNA, 58 bp, Artificial Sequence
  source: /note="Description of Artificial Sequence: Synthetic oligonucleotide"
ctgtgggcagtgccagatgaacttccttgggggacattcttatttttatcgagcacaa

SEQ ID NO: 2293 - DNA, 59 bp, Artificial Sequence; identical to SEQ ID NO: 2288
  source: /note="Description of Artificial Sequence: Synthetic oligonucleotide"

SEQ ID NO: 2294 - DNA, 58 bp, Artificial Sequence; identical to SEQ ID NO: 2289
  source: /note="Description of Artificial Sequence: Synthetic oligonucleotide"

SEQ ID NO: 2295 - DNA, 61 bp, Artificial Sequence; identical to SEQ ID NO: 2290
  source: /note="Description of Artificial Sequence: Synthetic oligonucleotide"

SEQ ID NO: 2296 - DNA, 58 bp, Artificial Sequence; identical to SEQ ID NO: 2292
  source: /note="Description of Artificial Sequence: Synthetic oligonucleotide"

SEQ ID NO: 2297 - DNA, 57 bp, Artificial Sequence
  source: /note="Description of Artificial Sequence: Synthetic oligonucleotide"
ctgtgggcagtgccagatgaactcattgggggacattcttatttttatcgagcacaa

SEQ ID NO: 2298 - RNA, 36 nt, Artificial Sequence; identical to SEQ ID NO: 2003
  source: /note="Description of Artificial Sequence: Synthetic oligonucleotide"
  modified_base (1)..(20): a, c, u, g, unknown or other

SEQ ID NO: 2299 - RNA, 36 nt, Artificial Sequence; identical to SEQ ID NO: 2003
  source: /note="Description of Artificial Sequence: Synthetic oligonucleotide"
  modified_base (1)..(20): a, c, u, g, unknown or other

SEQ ID NO: 2300 - RNA, 36 nt, Artificial Sequence; identical to SEQ ID NO: 2003
  source: /note="Description of Artificial Sequence: Synthetic oligonucleotide"
  modified_base (1)..(20): a, c, u, g, unknown or other

SEQ ID NO: 2301 - DNA, 73 bp, Artificial Sequence
  source: /note="Description of Artificial Sequence: Synthetic oligonucleotide"
actgttgattagaggtagggaaatgattttaatctgtgaccttgggcaagtagctatctaatgactaaaatgg

SEQ ID NO: 2302 - DNA, 81 bp, Artificial Sequence
  source: /note="Description of Artificial Sequence: Synthetic oligonucleotide"
actgttgattagaggtagggaaatgattttaatctgtgaccttggttgaatgggcaagtagctatctaatgactaaaatgg

SEQ ID NO: 2303 - DNA, 77 bp, Artificial Sequence
  source: /note="Description of Artificial Sequence: Synthetic oligonucleotide"
actgttgattagaggtagggaaatgattttaatctgtgaccttgaatgggcaagtagctatctaatgactaaaatgg

SEQ ID NO: 2304 - DNA, 79 bp, Artificial Sequence
  source: /note="Description of Artificial Sequence: Synthetic oligonucleotide"
actgttgattagaggtagggaaatgattttaatctgtgaccttgtgaatgggcaagtagctatctaatgactaaaatgg

SEQ ID NO: 2305 - DNA, 71 bp, Artificial Sequence
  source: /note="Description of Artificial Sequence: Synthetic oligonucleotide"
actgttgattagaggtagggaaatgattttaatctgtgaatgggcaagtagctatctaatgactaaaatgg

SEQ ID NO: 2306 - DNA, 70 bp, Artificial Sequence
  source: /note="Description of Artificial Sequence: Synthetic oligonucleotide"
atgggcaagtagctatctaatgactaaaatggaagagaaacagttttagtataacaagtgaaatacccat

SEQ ID NO: 2307 - DNA, 81 bp, Artificial Sequence
  source: /note="Description of Artificial Sequence: Synthetic oligonucleotide"
atgggcaagtagctatctaatgactaaaatggaaaaacactggaagagaaacagttttagtataacaagtgaaatacccat

SEQ ID NO: 2308 - DNA, 78 bp, Artificial Sequence
  source: /note="Description of Artificial Sequence: Synthetic oligonucleotide"
atgggcaagtagctatctaatgactaaaatggaacactggaagagaaacagttttagtataacaagtgaaatacccat

SEQ ID NO: 2309 - DNA, 78 bp, Artificial Sequence
  source: /note="Description of Artificial Sequence: Synthetic oligonucleotide"
atgggcaagtagctatctaatgactaaaatggaaaactggaagagaaacagttttagtataacaagtgaaatacccat

SEQ ID NO: 2310 - DNA, 81 bp, Artificial Sequence
  source: /note="Description of Artificial Sequence: Synthetic oligonucleotide"
atgggcaagtagctatctaatgactaaaatggaaaaccactggaagagaaacagttttagtataacaagtgaaatacccat

SEQ ID NO: 2311 - DNA, 77 bp, Artificial Sequence
  source: /note="Description of Artificial Sequence: Synthetic oligonucleotide"
cactggaagagaaacagttttagtataacaagtgaaatacccatgagtctgaggtgcctataggacatctatataaa

SEQ ID NO: 2312 - DNA, 79 bp, Artificial Sequence
  source: /note="Description of Artificial Sequence: Synthetic oligonucleotide"
cactggaagagaaacagttttagtataacaagtgaaatacccatctgagtctgaggtgcctataggacatctatataaa

SEQ ID NO: 2313 - DNA, 78 bp, Artificial Sequence
  source: /note="Description of Artificial Sequence: Synthetic oligonucleotide"
cactggaagagaaacagttttagtataacaagtgaaatacccactgagtctgaggtgcctataggacatctatataaa

SEQ ID NO: 2314 - DNA, 78 bp, Artificial Sequence
  source: /note="Description of Artificial Sequence: Synthetic oligonucleotide"
cactggaagagaaacagttttagtataacaagtgaaatacccatggagtctgaggtgcctataggacatctatataaa

SEQ ID NO: 2315 - DNA, 76 bp, Artificial Sequence
  source: /note="Description of Artificial Sequence: Synthetic oligonucleotide"
cactggaagagaaacagttttagtataacaagtgaaataccctgagtctgaggtgcctataggacatctatataaa

SEQ ID NO: 2316 - DNA, 70 bp, Artificial Sequence
  source: /note="Description of Artificial Sequence: Synthetic oligonucleotide"
taacaagtgaaatacccatgctgagtctgaggacatctatataaataagcccagtacattgtttgatata

SEQ ID NO: 2317 - DNA, 79 bp, Artificial Sequence
  source: /note="Description of Artificial Sequence: Synthetic oligonucleotide"
taacaagtgaaatacccatgctgagtctgaggtgccataggacatctatataaataagcccagtacattgtttgatata

SEQ ID NO: 2318 - DNA, 81 bp, Artificial Sequence
  source: /note="Description of Artificial Sequence: Synthetic oligonucleotide"
taacaagtgaaatacccatgctgagtctgaggtgccctataggacatctatataaataagcccagtacattgtttgatata

SEQ ID NO: 2319 - DNA, 81 bp, Artificial Sequence
  source: /note="Description of Artificial Sequence: Synthetic oligonucleotide"
taacaagtgaaatacccatgctgagtctgaggtgccttataggacatctatataaataagcccagtacattgtttgatata

SEQ ID NO: 2320 - DNA, 79 bp, Artificial Sequence
  source: /note="Description of Artificial Sequence: Synthetic oligonucleotide"
taacaagtgaaatacccatgctgagtctgaggtgctataggacatctatataaataagcccagtacattgtttgatata

SEQ ID NO: 2321 - DNA, 69 bp, Artificial Sequence
  source: /note="Description of Artificial Sequence: Synthetic oligonucleotide"
tagtataacaagtgaaatacccatgctgagtctgaggtgcctatataaataagcccagtacattgtttg

SEQ ID NO: 2322 - DNA, 79 bp, Artificial Sequence
  source: /note="Description of Artificial Sequence: Synthetic oligonucleotide"
tagtataacaagtgaaatacccatgctgagtctgaggtgcctatagacatctatataaataagcccagtacattgtttg

SEQ ID NO: 2323 - DNA, 79 bp, Artificial Sequence
  source: /note="Description of Artificial Sequence: Synthetic oligonucleotide"
tagtataacaagtgaaatacccatgctgagtctgaggtgcctatggacatctatataaataagcccagtacattgtttg

SEQ ID NO: 2324 - DNA, 81 bp, Artificial Sequence
  source: /note="Description of Artificial Sequence: Synthetic oligonucleotide"
tagtataacaagtgaaatacccatgctgagtctgaggtgcctatagggacatctatataaataagcccagtacattgtttg

SEQ ID NO: 2325 - DNA, 81 bp, Artificial Sequence
  source: /note="Description of Artificial Sequence: Synthetic oligonucleotide"
tagtataacaagtgaaatacccatgctgagtctgaggtgcctataaggacatctatataaataagcccagtacattgtttg

SEQ ID NO: 2326 - DNA, 78 bp, Artificial Sequence
  source: /note="Description of Artificial Sequence: Synthetic oligonucleotide"
tcagaggttagaaatcagagttgggaattgggattacaggctgtatttaagagtttagatataactgtgaatccaaga

SEQ ID NO: 2327 - DNA, 81 bp, Artificial Sequence
  source: /note="Description of Artificial Sequence: Synthetic oligonucleotide"
tcagaggttagaaatcagagttgggaattgggattaatacaggctgtatttaagagtttagatataactgtgaatccaaga

SEQ ID NO: 2328 - DNA, 79 bp, Artificial Sequence
  source: /note="Description of Artificial Sequence: Synthetic oligonucleotide"
tcagaggttagaaatcagagttgggaattgggatttacaggctgtatttaagagtttagatataactgtgaatccaaga

SEQ ID NO: 2329 - DNA, 81 bp, Artificial Sequence
  source: /note="Description of Artificial Sequence: Synthetic oligonucleotide"
tcagaggttagaaatcagagttgggaattgggattattacaggctgtatttaagagtttagatataactgtgaatccaaga

SEQ ID NO: 2330 - DNA, 82 bp, Artificial Sequence
  source: /note="Description of Artificial Sequence: Synthetic oligonucleotide"
tcagaggttagaaatcagagttgggaattgggattaaatacaggctgtatttaagagtttagatataactgtgaatccaaga

SEQ ID NO: 2331 - DNA, 79 bp, Artificial Sequence
  source: /note="Description of Artificial Sequence: Synthetic oligonucleotide"
tgtaaggaggatgagccacatggtatgggaggtatctaaggactctagggtcagagaaatatgggttatatccttctac

SEQ ID NO: 2332 - DNA, 70 bp, Artificial Sequence
  source: /note="Description of Artificial Sequence: Synthetic oligonucleotide"
tgtaaggaggatgagccacatggtatgggaggactctagggtcagagaaatatgggttatatccttctac

SEQ ID NO: 2333 - DNA, 67 bp, Artificial Sequence
  source: /note="Description of Artificial Sequence: Synthetic oligonucleotide"
tgtaaggaggatgagccacatggtatgggactctagggtcagagaaatatgggttatatccttctac

SEQ ID NO: 2334 - DNA, 81 bp, Artificial Sequence
  source: /note="Description of Artificial Sequence: Synthetic oligonucleotide"
tgtaaggaggatgagccacatggtatgggaggtataactaaggactctagggtcagagaaatatgggttatatccttctac

SEQ ID NO: 2335 - DNA, 75 bp, Artificial Sequence
  source: /note="Description of Artificial Sequence: Synthetic oligonucleotide"
tgtaaggaggatgagccacatggtatgggaggtaaggactctagggtcagagaaatatgggttatatccttctac

SEQ ID NO: 2336 - DNA, 81 bp, Artificial Sequence
  source: /note="Description of Artificial Sequence: Synthetic oligonucleotide"
gatgagccacatggtatgggaggtatactaaggacttctagggtcagagaaatatgggttatatccttctacaaaattcac

SEQ ID NO: 2337 - DNA, 71 bp, Artificial Sequence
  source: /note="Description of Artificial Sequence: Synthetic oligonucleotide"
gatgagccacatggtatgggaggtatactagggtcagagaaatatgggttatatccttctacaaaattcac

SEQ ID NO: 2338 - DNA, 72 bp, Artificial Sequence
  source: /note="Description of Artificial Sequence: Synthetic oligonucleotide"
gatgagccacatggtatgggaggtatactaagggtcagagaaatatgggttatatccttctacaaaattcac

SEQ ID NO: 2339 - DNA, 78 bp, Artificial Sequence
  source: /note="Description of Artificial Sequence: Synthetic oligonucleotide"
gatgagccacatggtatgggaggtatactaaggactagggtcagagaaatatgggttatatccttctacaaaattcac

SEQ ID NO: 2340 - DNA, 71 bp, Artificial Sequence
  source: /note="Description of Artificial Sequence: Synthetic oligonucleotide"
gatgagccacatggtatgggaggtatactaaggtcagagaaatatgggttatatccttctacaaaattcac

SEQ ID NO: 2341 - RNA, 36 nt, Artificial Sequence; identical to SEQ ID NO: 2003
  source: /note="Description of Artificial Sequence: Synthetic oligonucleotide"
  modified_base (1)..(20): a, c, u, g, unknown or other

SEQ ID NO: 2342 - RNA, 36 nt, Artificial Sequence; identical to SEQ ID NO: 2003
  source: /note="Description of Artificial Sequence: Synthetic oligonucleotide"
  modified_base (1)..(20): a, c, u, g, unknown or other

SEQ ID NO: 2343 - RNA, 36 nt, Artificial Sequence; identical to SEQ ID NO: 2003
  source: /note="Description of Artificial Sequence: Synthetic oligonucleotide"
  modified_base (1)..(20): a, c, u, g, unknown or other

SEQ ID NO: 2344 - RNA, 36 nt, Artificial Sequence; identical to SEQ ID NO: 2003
  source: /note="Description of Artificial Sequence: Synthetic oligonucleotide"
  modified_base (1)..(20): a, c, u, g, unknown or other

SEQ ID NO: 2345 - RNA, 36 nt, Artificial Sequence; identical to SEQ ID NO: 2003
  source: /note="Description of Artificial Sequence: Synthetic oligonucleotide"
  modified_base (1)..(20): a, c, u, g, unknown or other

SEQ ID NO: 2346 - DNA, 79 bp, Artificial Sequence
  source: /note="Description of Artificial Sequence: Synthetic oligonucleotide"
ttctgtcatgtgtgtcttgactcagaaaccctgttctcctctaatatctccccaccgcatctctttcagcagttgtttc

SEQ ID NO: 2347 - DNA, 67 bp, Artificial Sequence
  source: /note="Description of Artificial Sequence: Synthetic oligonucleotide"
ttctgtcatgtgtgtcttgactcagaaaccctgttctccccaccgcatctctttcagcagttgtttc

SEQ ID NO: 2348 - DNA, 76 bp, Artificial Sequence
  source: /note="Description of Artificial Sequence: Synthetic oligonucleotide"
ttctgtcatgtgtgtcttgactcagaaaccctgttctcctctatctccccaccgcatctctttcagcagttgtttc

SEQ ID NO: 2349 - DNA, 78 bp, Artificial Sequence
  source: /note="Description of Artificial Sequence: Synthetic oligonucleotide"
ttctgtcatgtgtgtcttgactcagaaaccctgttctcctctatatctccccaccgcatctctttcagcagttgtttc

SEQ ID NO: 2350 - DNA, 67 bp, Artificial Sequence
  source: /note="Description of Artificial Sequence: Synthetic oligonucleotide"
ttctgtcatgtgtgtcttgactcagaaaccctgttctcctcaccgcatctctttcagcagttgtttc

SEQ ID NO: 2351 - DNA, 67 bp, Artificial Sequence; identical to SEQ ID NO: 2347
  source: /note="Description of Artificial Sequence: Synthetic oligonucleotide"

SEQ ID NO: 2352 - DNA, 79 bp, Artificial Sequence; identical to SEQ ID NO: 2346
  source: /note="Description of Artificial Sequence: Synthetic oligonucleotide"

SEQ ID NO: 2353 - DNA, 78 bp, Artificial Sequence; identical to SEQ ID NO: 2349
  source: /note="Description of Artificial Sequence: Synthetic oligonucleotide"

SEQ ID NO: 2354 - DNA, 76 bp, Artificial Sequence; identical to SEQ ID NO: 2348
  source: /note="Description of Artificial Sequence: Synthetic oligonucleotide"

SEQ ID NO: 2355 - DNA, 67 bp, Artificial Sequence; identical to SEQ ID NO: 2350
  source: /note="Description of Artificial Sequence: Synthetic oligonucleotide"

SEQ ID NO: 2356 - DNA, 67 bp, Artificial Sequence
  source: /note="Description of Artificial Sequence: Synthetic oligonucleotide"
tcttgactcagaaaccctgttctcctctacatatctctttcagcagttgtttctaaaaatatcctcc

SEQ ID NO: 2357 - DNA, 79 bp, Artificial Sequence
  source: /note="Description of Artificial Sequence: Synthetic oligonucleotide"
tcttgactcagaaaccctgttctcctctacatatctccccacccatctctttcagcagttgtttctaaaaatatcctcc

SEQ ID NO: 2358 - DNA, 78 bp, Artificial Sequence
  source: /note="Description of Artificial Sequence: Synthetic oligonucleotide"
tcttgactcagaaaccctgttctcctctacatatctccccaccatctctttcagcagttgtttctaaaaatatcctcc

SEQ ID NO: 2359 - DNA, 81 bp, Artificial Sequence
  source: /note="Description of Artificial Sequence: Synthetic oligonucleotide"
tcttgactcagaaaccctgttctcctctacatatctccccaccggcatctctttcagcagttgtttctaaaaatatcctcc

SEQ ID NO: 2360 - DNA, 75 bp, Artificial Sequence
  source: /note="Description of Artificial Sequence: Synthetic oligonucleotide"
tcttgactcagaaaccctgttctcctctacatatctccccatctctttcagcagttgtttctaaaaatatcctcc

SEQ ID NO: 2361 - DNA, 67 bp, Artificial Sequence; identical to SEQ ID NO: 2356
  source: /note="Description of Artificial Sequence: Synthetic oligonucleotide"

SEQ ID NO: 2362 - DNA, 79 bp, Artificial Sequence; identical to SEQ ID NO: 2357
  source: /note="Description of Artificial Sequence: Synthetic oligonucleotide"

SEQ ID NO: 2363 - DNA, 78 bp, Artificial Sequence; identical to SEQ ID NO: 2358
  source: /note="Description of Artificial Sequence: Synthetic oligonucleotide"

SEQ ID NO: 2364 - DNA, 81 bp, Artificial Sequence; identical to SEQ ID NO: 2359
  source: /note="Description of Artificial Sequence: Synthetic oligonucleotide"

SEQ ID NO: 2365 - DNA, 79 bp, Artificial Sequence
  source: /note="Description of Artificial Sequence: Synthetic oligonucleotide"
tcttgactcagaaaccctgttctcctctacatatctccccacgcatctctttcagcagttgtttctaaaaatatcctcc

SEQ ID NO: 2366 - DNA, 79 bp, Artificial Sequence
  source: /note="Description of Artificial Sequence: Synthetic oligonucleotide"
cctagtttcatttttgcagaagtgttttaggctaattagtggaatgtatcttagagtttaacttatttgtttctgtcac

SEQ ID NO: 2367 - DNA, 78 bp, Artificial Sequence
  source: /note="Description of Artificial Sequence: Synthetic oligonucleotide"
cctagtttcatttttgcagaagtgttttaggctaatagtggaatgtatcttagagtttaacttatttgtttctgtcac

SEQ ID NO: 2368 - DNA, 70 bp, Artificial Sequence
  source: /note="Description of Artificial Sequence: Synthetic oligonucleotide"
cctagtttcatttttgcagaagtgttttagtggaatgtatcttagagtttaacttatttgtttctgtcac

SEQ ID NO: 2369 - DNA, 81 bp, Artificial Sequence
  source: /note="Description of Artificial Sequence: Synthetic oligonucleotide"
cctagtttcatttttgcagaagtgttttaggctaataatagtggaatgtatcttagagtttaacttatttgtttctgtcac

SEQ ID NO: 2370 - DNA, 79 bp, Artificial Sequence
  source: /note="Description of Artificial Sequence: Synthetic oligonucleotide"
cctagtttcatttttgcagaagtgttttaggctaataagtggaatgtatcttagagtttaacttatttgtttctgtcac

SEQ ID NO: 2371 - DNA, 78 bp, Artificial Sequence; identical to SEQ ID NO: 2367
  source: /note="Description of Artificial Sequence: Synthetic oligonucleotide"

SEQ ID NO: 2372 - DNA, 79 bp, Artificial Sequence; identical to SEQ ID NO: 2366
  source: /note="Description of Artificial Sequence: Synthetic oligonucleotide"

SEQ ID NO: 2373 - DNA, 70 bp, Artificial Sequence; identical to SEQ ID NO: 2368
  source: /note="Description of Artificial Sequence: Synthetic oligonucleotide"

SEQ ID NO: 2374 - DNA, 79 bp, Artificial Sequence; identical to SEQ ID NO: 2370
  source: /note="Description of Artificial Sequence: Synthetic oligonucleotide"

SEQ ID NO: 2375 - DNA, 68 bp, Artificial Sequence
  source: /note="Description of Artificial Sequence: Synthetic oligonucleotide"
cctagtttcatttttgcagaagtgttttaggaatgtatcttagagtttaacttatttgtttctgtcac

SEQ ID NO: 2376 - DNA, 79 bp, Artificial Sequence
  source: /note="Description of Artificial Sequence: Synthetic oligonucleotide"
tagagatttttgtctccaagggaattttgagaggttgaatggacaaatctattgctgcagtttaaacttgcttgcttcc

SEQ ID NO: 2377 - DNA, 75 bp, Artificial Sequence
  source: /note="Description of Artificial Sequence: Synthetic oligonucleotide"
tagagatttttgtctccaagggaattttgagaggttggacaaatctattgctgcagtttaaacttgcttgcttcc

SEQ ID NO: 2378 - DNA, 71 bp, Artificial Sequence
  source: /note="Description of Artificial Sequence: Synthetic oligonucleotide"
tagagatttttgtctccaagggaattttgaatggacaaatctattgctgcagtttaaacttgcttgcttcc

SEQ ID NO: 2379 - DNA, 71 bp, Artificial Sequence
  source: /note="Description of Artificial Sequence: Synthetic oligonucleotide"
tagagatttttgtctccaagggaattttgagaggacaaatctattgctgcagtttaaacttgcttgcttcc

SEQ ID NO: 2380 - DNA, 81 bp, Artificial Sequence
  source: /note="Description of Artificial Sequence: Synthetic oligonucleotide"
tagagatttttgtctccaagggaattttgagaggttgggaatggacaaatctattgctgcagtttaaacttgcttgcttcc

SEQ ID NO: 2381 - DNA, 79 bp, Artificial Sequence; identical to SEQ ID NO: 2376
  source: /note="Description of Artificial Sequence: Synthetic oligonucleotide"

SEQ ID NO: 2382 - DNA, 71 bp, Artificial Sequence; identical to SEQ ID NO: 2379
  source: /note="Description of Artificial Sequence: Synthetic oligonucleotide"

SEQ ID NO: 2383 - DNA, 75 bp, Artificial Sequence; identical to SEQ ID NO: 2377
  source: /note="Description of Artificial Sequence: Synthetic oligonucleotide"

SEQ ID NO: 2384 - DNA, 81 bp, Artificial Sequence; identical to SEQ ID NO: 2380
  source: /note="Description of Artificial Sequence: Synthetic oligonucleotide"

SEQ ID NO: 2385 - DNA, 71 bp, Artificial Sequence; identical to SEQ ID NO: 2378
  source: /note="Description of Artificial Sequence: Synthetic oligonucleotide"

SEQ ID NO: 2386 - DNA, 79 bp, Artificial Sequence
  source: /note="Description of Artificial Sequence: Synthetic oligonucleotide"
gagaaaggaaggaaggaagaggggaagagagaggatgaagggatggaggagaagaaggaaaaataaataatggagagga

SEQ ID NO: 2387 - DNA, 71 bp, Artificial Sequence
  source: /note="Description of Artificial Sequence: Synthetic oligonucleotide"
gagaaaggaaggaaggaagaggggaagagagaggatggaggagaagaaggaaaaataaataatggagagga

SEQ ID NO: 2388 - DNA, 72 bp, Artificial Sequence
  source: /note="Description of Artificial Sequence: Synthetic oligonucleotide"
gagaaaggaaggaaggaagaggggaagagagagggatggaggagaagaaggaaaaataaataatggagagga

SEQ ID NO: 2389 - DNA, 81 bp, Artificial Sequence
  source: /note="Description of Artificial Sequence: Synthetic oligonucleotide"
gagaaaggaaggaaggaagaggggaagagagaggatgggaagggatggaggagaagaaggaaaaataaataatggagagga

SEQ ID NO: 2390 - DNA, 76 bp, Artificial Sequence
  source: /note="Description of Artificial Sequence: Synthetic oligonucleotide"
gagaaaggaaggaaggaagaggggaagagagaggaagggatggaggagaagaaggaaaaataaataatggagagga

SEQ ID NO: 2391 - DNA, 71 bp, Artificial Sequence; identical to SEQ ID NO: 2387
  source: /note="Description of Artificial Sequence: Synthetic oligonucleotide"

SEQ ID NO: 2392 - DNA, 79 bp, Artificial Sequence; identical to SEQ ID NO: 2386
  source: /note="Description of Artificial Sequence: Synthetic oligonucleotide"

SEQ ID NO: 2393 - DNA, 71 bp, Artificial Sequence
  source: /note="Description of Artificial Sequence: Synthetic oligonucleotide"
gagaaaggaaggaaggaagaggggaagagaagggatggaggagaagaaggaaaaataaataatggagagga

SEQ ID NO: 2394 - DNA, 76 bp, Artificial Sequence; identical to SEQ ID NO: 2390
  source: /note="Description of Artificial Sequence: Synthetic oligonucleotide"

SEQ ID NO: 2395 - DNA, 72 bp, Artificial Sequence; identical to SEQ ID NO: 2388
  source: /note="Description of Artificial Sequence: Synthetic oligonucleotide"

SEQ ID NO: 2396 - DNA, 78 bp, Artificial Sequence
  source: /note="Description of Artificial Sequence: Synthetic oligonucleotide"
gagaaagagaaagggaagggaagagaggaaagaagaagaggagagaaaagaaacgaagagaggggaagggaaggaaaa

SEQ ID NO: 2397 - DNA, 75 bp, Artificial Sequence
  source: /note="Description of Artificial Sequence: Synthetic oligonucleotide"
gagaaagagaaagggaagggaagagaggaaagaagaggagagaaaagaaacgaagagaggggaagggaaggaaaa

SEQ ID NO: 2398 - DNA, 65 bp, Artificial Sequence
  source: /note="Description of Artificial Sequence: Synthetic oligonucleotide"
gagaaagagaaagggaagggaagagaggagagaaaagaaacgaagagaggggaagggaaggaaaa

SEQ ID NO: 2399 - DNA, 60 bp, Artificial Sequence
  source: /note="Description of Artificial Sequence: Synthetic oligonucleotide"
gagaaagagaaagggaagggaagagaggaaagaaacgaagagaggggaagggaaggaaaa

SEQ ID NO: 2400 - DNA, 72 bp, Artificial Sequence
  source: /note="Description of Artificial Sequence: Synthetic oligonucleotide"
gagaaagagaaagggaagggaagagaggaaagaggagagaaaagaaacgaagagaggggaagggaaggaaaa

SEQ ID NO: 2401 - DNA, 75 bp, Artificial Sequence; identical to SEQ ID NO: 2397
  source: /note="Description of Artificial Sequence: Synthetic oligonucleotide"

SEQ ID NO: 2402 - DNA, 78 bp, Artificial Sequence; identical to SEQ ID NO: 2396
  source: /note="Description of Artificial Sequence: Synthetic oligonucleotide"

SEQ ID NO: 2403 - DNA, 65 bp, Artificial Sequence; identical to SEQ ID NO: 2398
  source: /note="Description of Artificial Sequence: Synthetic oligonucleotide"

SEQ ID NO: 2404 - DNA, 81 bp, Artificial Sequence
  source: /note="Description of Artificial Sequence: Synthetic oligonucleotide"
gagaaagagaaagggaagggaagagaggaaagaagaggaagaggagagaaaagaaacgaagagaggggaagggaaggaaaa

SEQ ID NO: 2405 - DNA, 60 bp, Artificial Sequence
  source: /note="Description of Artificial Sequence: Synthetic oligonucleotide"
gagaaagagaaagggaagggaggagagaaaagaaacgaagagaggggaagggaaggaaaa

SEQ ID NO: 2406 - DNA, 73 bp, Artificial Sequence
  source: /note="Description of Artificial Sequence: Synthetic oligonucleotide"
aaatgcttatgacagcaataatcataaaaacctcaaaccacttaaatgcttaccaacagtagaattgataaat

SEQ ID NO: 2407 - DNA, 81 bp, Artificial Sequence
  source: /note="Description of Artificial Sequence: Synthetic oligonucleotide"
aaatgcttatgacagcaataatcataaaaacctcaaaccggtaggccacttaaatgcttaccaacagtagaattgataaat

SEQ ID NO: 2408 - DNA, 81 bp, Artificial Sequence
  source: /note="Description of Artificial Sequence: Synthetic oligonucleotide"
aaatgcttatgacagcaataatcataaaaacctcaaaccggtaagccacttaaatgcttaccaacagtagaattgataaat

SEQ ID NO: 2409 - DNA, 72 bp, Artificial Sequence
  source: /note="Description of Artificial Sequence: Synthetic oligonucleotide"
aaatgcttatgacagcaataatcataaaaacctcagccacttaaatgcttaccaacagtagaattgataaat

SEQ ID NO: 2410 - DNA, 66 bp, Artificial Sequence
  source: /note="Description of Artificial Sequence: Synthetic oligonucleotide"
aaatgcttatgacagcaataatcataaaaaccacttaaatgcttaccaacagtagaattgataaat

SEQ ID NO: 2411 - DNA, 73 bp, Artificial Sequence; identical to SEQ ID NO: 2406
  source: /note="Description of Artificial Sequence: Synthetic oligonucleotide"

SEQ ID NO: 2412 - DNA, 81 bp, Artificial Sequence; identical to SEQ ID NO: 2407
  source: /note="Description of Artificial Sequence: Synthetic oligonucleotide"

SEQ ID NO: 2413 - DNA, 81 bp, Artificial Sequence; identical to SEQ ID NO: 2408
  source: /note="Description of Artificial Sequence: Synthetic oligonucleotide"

SEQ ID NO: 2414 - DNA, 72 bp, Artificial Sequence
  source: /note="Description of Artificial Sequence: Synthetic oligonucleotide"
aaatgcttatgacagcaataatcataaaaacctcaaaccggtaaatgcttaccaacagtagaattgataaat

SEQ ID NO: 2415 - DNA, 73 bp, Artificial Sequence
  source: /note="Description of Artificial Sequence: Synthetic oligonucleotide"
aaatgcttatgacagcaataatcataaaaacctcaaaccggttaaatgcttaccaacagtagaattgataaat

SEQ ID NO: 2416 - DNA, 81 bp, Artificial Sequence
  source: /note="Description of Artificial Sequence: Synthetic oligonucleotide"
aaatgcattttacagcatttggttgattaaaagtaacccagaggtgagttcaaactatatgactttatttgtatatagaaa

SEQ ID NO: 2417 - DNA, 73 bp, Artificial Sequence
  source: /note="Description of Artificial Sequence: Synthetic oligonucleotide"
aaatgcattttacagcatttggttgattaaaagaggtgagttcaaactatatgactttatttgtatatagaaa

SEQ ID NO: 2418 - DNA, 79 bp, Artificial Sequence
  source: /note="Description of Artificial Sequence: Synthetic oligonucleotide"
aaatgcattttacagcatttggttgattaaaagtaacagaggtgagttcaaactatatgactttatttgtatatagaaa

SEQ ID NO: 2419 - DNA, 71 bp, Artificial Sequence
  source: /note="Description of Artificial Sequence: Synthetic oligonucleotide"
aaatgcattttacagcatttggttgattaaaaggtgagttcaaactatatgactttatttgtatatagaaa

SEQ ID NO: 2420 - DNA, 60 bp, Artificial Sequence
  source: /note="Description of Artificial Sequence: Synthetic oligonucleotide"
aaatgcattttacagcatttggttgagttcaaactatatgactttatttgtatatagaaa

SEQ ID NO: 2421 - DNA, 81 bp, Artificial Sequence; identical to SEQ ID NO: 2416
  source: /note="Description of Artificial Sequence: Synthetic oligonucleotide"

SEQ ID NO: 2422 - DNA, 73 bp, Artificial Sequence; identical to SEQ ID NO: 2417
  source: /note="Description of Artificial Sequence: Synthetic oligonucleotide"

SEQ ID NO: 2423 - DNA, 79 bp, Artificial Sequence; identical to SEQ ID NO: 2418
  source: /note="Description of Artificial Sequence: Synthetic oligonucleotide"

SEQ ID NO: 2424 - DNA, 71 bp, Artificial Sequence; identical to SEQ ID NO: 2419
  source: /note="Description of Artificial Sequence: Synthetic oligonucleotide"

SEQ ID NO: 2425 - DNA, 60 bp, Artificial Sequence; identical to SEQ ID NO: 2420
  source: /note="Description of Artificial Sequence: Synthetic oligonucleotide"

SEQ ID NO: 2426 - DNA, 81 bp, Artificial Sequence
  source: /note="Description of Artificial Sequence: Synthetic oligonucleotide"
cctggaagccaacgaaagatattgaataattcaagaaaaggtggtggcatggtttgatttgtgtctttaaaagattattct

SEQ ID NO: 2427 - DNA, 76 bp, Artificial Sequence
  source: /note="Description of Artificial Sequence: Synthetic oligonucleotide"
cctggaagccaacgaaagatattgaataattcaaggtggtggcatggtttgatttgtgtctttaaaagattattct

SEQ ID NO: 2428 - DNA, 79 bp, Artificial Sequence
  source: /note="Description of Artificial Sequence: Synthetic oligonucleotide"
cctggaagccaacgaaagatattgaataattcaagaaggtggtggcatggtttgatttgtgtctttaaaagattattct

SEQ ID NO: 2429 - DNA, 78 bp, Artificial Sequence
  source: /note="Description of Artificial Sequence: Synthetic oligonucleotide"
cctggaagccaacgaaagatattgaataattcaagaggtggtggcatggtttgatttgtgtctttaaaagattattct

SEQ ID NO: 2430 - DNA, 75 bp, Artificial Sequence
  source: /note="Description of Artificial Sequence: Synthetic oligonucleotide"
cctggaagccaacgaaagatattgaataattcaggtggtggcatggtttgatttgtgtctttaaaagattattct

SEQ ID NO: 2431 - DNA, 81 bp, Artificial Sequence; identical to SEQ ID NO: 2426
  source: /note="Description of Artificial Sequence: Synthetic oligonucleotide"

SEQ ID NO: 2432 - DNA, 76 bp, Artificial Sequence; identical to SEQ ID NO: 2427
  source: /note="Description of Artificial Sequence: Synthetic oligonucleotide"

SEQ ID NO: 2433 - DNA, 79 bp, Artificial Sequence; identical to SEQ ID NO: 2428
  source: /note="Description of Artificial Sequence: Synthetic oligonucleotide"

SEQ ID NO: 2434 - DNA, 78 bp, Artificial Sequence; identical to SEQ ID NO: 2429
  source: /note="Description of Artificial Sequence: Synthetic oligonucleotide"

SEQ ID NO: 2435 - DNA, 82 bp, Artificial Sequence
  source: /note="Description of Artificial Sequence: Synthetic oligonucleotide"
cctggaagccaacgaaagatattgaataattcaagaacaaggtggtggcatggtttgatttgtgtctttaaaagattattct

SEQ ID NO: 2436 - DNA, 67 bp, Artificial Sequence
  source: /note="Description of Artificial Sequence: Synthetic oligonucleotide"
ccttggcctcccaaagtgctgggtttacaagcctgagccaggataaggtctaaaagtggaaagaata

SEQ ID NO: 2437 - DNA, 79 bp, Artificial Sequence
  source: /note="Description of Artificial Sequence: Synthetic oligonucleotide"
ccttggcctcccaaagtgctgggtttacaagcctgagccacccatccagccaggataaggtctaaaagtggaaagaata

SEQ ID NO: 2438 - DNA, 75 bp, Artificial Sequence
  source: /note="Description of Artificial Sequence: Synthetic oligonucleotide"
ccttggcctcccaaagtgctgggtttacaagcctgagccatccagccaggataaggtctaaaagtggaaagaata

SEQ ID NO: 2439 - DNA, 79 bp, Artificial Sequence
  source: /note="Description of Artificial Sequence: Synthetic oligonucleotide"
ccttggcctcccaaagtgctgggtttacaagcctgagccaccgatccagccaggataaggtctaaaagtggaaagaata

SEQ ID NO: 2440 - DNA, 74 bp, Artificial Sequence
  source: /note="Description of Artificial Sequence: Synthetic oligonucleotide"
ccttggcctcccaaagtgctgggtttacaagcctgagccaccagccaggataaggtctaaaagtggaaagaata

SEQ ID NO: 2441 - DNA, 67 bp, Artificial Sequence; identical to SEQ ID NO: 2436
  source: /note="Description of Artificial Sequence: Synthetic oligonucleotide"

SEQ ID NO: 2442 - DNA, 79 bp, Artificial Sequence; identical to SEQ ID NO: 2437
  source: /note="Description of Artificial Sequence: Synthetic oligonucleotide"

SEQ ID NO: 2443 - DNA, 79 bp, Artificial Sequence; identical to SEQ ID NO: 2439
  source: /note="Description of Artificial Sequence: Synthetic oligonucleotide"

SEQ ID NO: 2444 - DNA, 78 bp, Artificial Sequence
  source: /note="Description of Artificial Sequence: Synthetic oligonucleotide"
ccttggcctcccaaagtgctgggtttacaagcctgagccaccgtccagccaggataaggtctaaaagtggaaagaata

SEQ ID NO: 2445 - DNA, 74 bp, Artificial Sequence; identical to SEQ ID NO: 2440
  source: /note="Description of Artificial Sequence: Synthetic oligonucleotide"

SEQ ID NO: 2446 - DNA, 74 bp, Artificial Sequence
  source: /note="Description of Artificial Sequence: Synthetic oligonucleotide"
aagtgctgggtttacaagcctgagccaccgcatccagccaggtctaaaagtggaaagaatagcatctactcttg

SEQ ID NO: 2447 - DNA, 81 bp, Artificial Sequence
  source: /note="Description of Artificial Sequence: Synthetic oligonucleotide"
aagtgctgggtttacaagcctgagccaccgcatccagccaggattaaggtctaaaagtggaaagaatagcatctactcttg

SEQ ID NO: 2448 - DNA, 81 bp, Artificial Sequence
  source: /note="Description of Artificial Sequence: Synthetic oligonucleotide"
aagtgctgggtttacaagcctgagccaccgcatccagccaggaataaggtctaaaagtggaaagaatagcatctactcttg

SEQ ID NO: 2449 - DNA, 79 bp, Artificial Sequence
  source: /note="Description of Artificial Sequence: Synthetic oligonucleotide"
aagtgctgggtttacaagcctgagccaccgcatccagccaggaaaggtctaaaagtggaaagaatagcatctactcttg

SEQ ID NO: 2450 - DNA, 75 bp, Artificial Sequence
  source: /note="Description of Artificial Sequence: Synthetic oligonucleotide"
aagtgctgggtttacaagcctgagccaccgcatccagccaggatctaaaagtggaaagaatagcatctactcttg

SEQ ID NO: 2451 - DNA, 74 bp, Artificial Sequence; identical to SEQ ID NO: 2446
  source: /note="Description of Artificial Sequence: Synthetic oligonucleotide"

SEQ ID NO: 2452 - DNA, 81 bp, Artificial Sequence; identical to SEQ ID NO: 2447
  source: /note="Description of Artificial Sequence: Synthetic oligonucleotide"

SEQ ID NO: 2453 - DNA, 81 bp, Artificial Sequence; identical to SEQ ID NO: 2448
  source: /note="Description of Artificial Sequence: Synthetic oligonucleotide"

SEQ ID NO: 2454 - DNA, 79 bp, Artificial Sequence; identical to SEQ ID NO: 2449
  source: /note="Description of Artificial Sequence: Synthetic oligonucleotide"

SEQ ID NO: 2455 - DNA, 75 bp, Artificial Sequence; identical to SEQ ID NO: 2450
  source: /note="Description of Artificial Sequence: Synthetic oligonucleotide"

SEQ ID NO: 2456 - DNA, 76 bp, Artificial Sequence
  source: /note="Description of Artificial Sequence: Synthetic oligonucleotide"
tagcatctactcttgttcaggaaacaatgaggacctgggcagtaagagtggtgattaatagatagggacaaattga

SEQ ID NO: 2457 - DNA, 79 bp, Artificial Sequence
  source: /note="Description of Artificial Sequence: Synthetic oligonucleotide"
tagcatctactcttgttcaggaaacaatgaggacctactgggcagtaagagtggtgattaatagatagggacaaattga

SEQ ID NO: 2458 - DNA, 75 bp, Artificial Sequence
  source: /note="Description of Artificial Sequence: Synthetic oligonucleotide"
tagcatctactcttgttcaggaaacaatgaggactgggcagtaagagtggtgattaatagatagggacaaattga

SEQ ID NO: 2459 - DNA, 69 bp, Artificial Sequence
  source: /note="Description of Artificial Sequence: Synthetic oligonucleotide"
tagcatctactcttgttcaggaaacaatgaggcagtaagagtggtgattaatagatagggacaaattga

SEQ ID NO: 2460 - DNA, 68 bp, Artificial Sequence
  source: /note="Description of Artificial Sequence: Synthetic oligonucleotide"
tagcatctactcttgttcaggaaacaatgggcagtaagagtggtgattaatagatagggacaaattga

SEQ ID NO: 2461 - DNA, 76 bp, Artificial Sequence; identical to SEQ ID NO: 2456
  source: /note="Description of Artificial Sequence: Synthetic oligonucleotide"

SEQ ID NO: 2462 - DNA, 79 bp, Artificial Sequence; identical to SEQ ID NO: 2457
  source: /note="Description of Artificial Sequence: Synthetic oligonucleotide"

SEQ ID NO: 2463 - DNA, 75 bp, Artificial Sequence; identical to SEQ ID NO: 2458
  source: /note="Description of Artificial Sequence: Synthetic oligonucleotide"

SEQ ID NO: 2464 - DNA, 70 bp, Artificial Sequence
  source: /note="Description of Artificial Sequence: Synthetic oligonucleotide"
tagcatctactcttgttcaggaaacaatgaggacagtaagagtggtgattaatagatagggacaaattga

SEQ ID NO: 2465 - DNA, 69 bp, Artificial Sequence; identical to SEQ ID NO: 2459
  source: /note="Description of Artificial Sequence: Synthetic oligonucleotide"

SEQ ID NO: 2466 - RNA, 36 nt, Artificial Sequence; identical to SEQ ID NO: 2003
  source: /note="Description of Artificial Sequence: Synthetic oligonucleotide"
  modified_base (1)..(20): a, c, u, g, unknown or other

SEQ ID NO: 2467 - RNA, 36 nt, Artificial Sequence; identical to SEQ ID NO: 2003
  source: /note="Description of Artificial Sequence: Synthetic oligonucleotide"
  modified_base (1)..(20): a, c, u, g, unknown or other

SEQ ID NO: 2468 - RNA, 36 nt, Artificial Sequence; identical to SEQ ID NO: 2003
  source: /note="Description of Artificial Sequence: Synthetic oligonucleotide"
  modified_base (1)..(20): a, c, u, g, unknown or other

SEQ ID NO: 2469 - RNA, 36 nt, Artificial Sequence; identical to SEQ ID NO: 2003
  source: /note="Description of Artificial Sequence: Synthetic oligonucleotide"
  modified_base (1)..(20): a, c, u, g, unknown or other

SEQ ID NO: 2470 - RNA, 36 nt, Artificial Sequence
  source: /note="Description of Artificial Sequence: Synthetic oligonucleotide"
cacaaacggaaacaaugcaaguuuuagagcuaugcu

SEQ ID NO: 2471 - RNA, 100 nt, Artificial Sequence; identical to SEQ ID NO: 2013
  source: /note="Description of Artificial Sequence: Synthetic polynucleotide"
  modified_base (1)..(20): a, c, u, g, unknown or other

SEQ ID NO: 2472 - RNA, 100 nt, Artificial Sequence; identical to SEQ ID NO: 2013
  source: /note="Description of Artificial Sequence: Synthetic polynucleotide"
  modified_base (1)..(20): a, c, u, g, unknown or other

SEQ ID NO: 2473 - RNA, 100 nt, Artificial Sequence; identical to SEQ ID NO: 2013
  source: /note="Description of Artificial Sequence: Synthetic polynucleotide"
  modified_base (1)..(20): a, c, u, g, unknown or other

SEQ ID NO: 2474 - RNA, 42 nt, Artificial Sequence; identical to SEQ ID NO: 2010
  source: /note="Description of Artificial Sequence: Synthetic oligonucleotide"
  modified_base (1)..(20): a, c, u, g, unknown or other

SEQ ID NO: 2475 - RNA, 42 nt, Artificial Sequence; identical to SEQ ID NO: 2010
  source: /note="Description of Artificial Sequence: Synthetic oligonucleotide"
  modified_base (1)..(20): a, c, u, g, unknown or other

SEQ ID NO: 2476 - RNA, 42 nt, Artificial Sequence; identical to SEQ ID NO: 2010
  source: /note="Description of Artificial Sequence: Synthetic oligonucleotide"
  modified_base (1)..(20): a, c, u, g, unknown or other

SEQ ID NO: 2477 - DNA, 75 bp, Artificial Sequence
  source: /note="Description of Artificial Sequence: Synthetic oligonucleotide"
acattcttatttttatcgagcacaaacggaaacaatggcagcctctgcttagaaaaagctgtggataagccacct

SEQ ID NO: 2478 - DNA, 79 bp, Artificial Sequence
  source: /note="Description of Artificial Sequence: Synthetic oligonucleotide"
acattcttatttttatcgagcacaaacggaaacaatgaatggcagcctctgcttagaaaaagctgtggataagccacct

SEQ ID NO: 2479 - DNA, 78 bp, Artificial Sequence
  source: /note="Description of Artificial Sequence: Synthetic oligonucleotide"
acattcttatttttatcgagcacaaacggaaacaatgatggcagcctctgcttagaaaaagctgtggataagccacct

SEQ ID NO: 2480 - DNA, 74 bp, Artificial Sequence
  source: /note="Description of Artificial Sequence: Synthetic oligonucleotide"
acattcttatttttatcgagcacaaacggaaacaatgcagcctctgcttagaaaaagctgtggataagccacct

SEQ ID NO: 2481 - DNA, 79 bp, Artificial Sequence
  source: /note="Description of Artificial Sequence: Synthetic oligonucleotide"
acattcttatttttatcgagcacaaacggaaacaatcaatggcagcctctgcttagaaaaagctgtggataagccacct

SEQ ID NO: 2482 - DNA, 81 bp, Artificial Sequence
  source: /note="Description of Artificial Sequence: Synthetic oligonucleotide"
acattcttatttttatcgagcacaaacggaaacaaatgcaatggcagcctctgcttagaaaaagctgtggataagccacct

SEQ ID NO: 2483 - DNA, 67 bp, Artificial Sequence; identical to SEQ ID NO: 2347
  source: /note="Description of Artificial Sequence: Synthetic oligonucleotide"

SEQ ID NO: 2484 - DNA, 80 bp, Artificial Sequence
  source: /note="Description of Artificial Sequence: Synthetic oligonucleotide"
ttctgtcatgtgtgtcttgactcagaaaccctgttctcctctgcatatctccccaccgcatctctttcagcagttgtttc

SEQ ID NO: 2485 - DNA, 79 bp, Artificial Sequence; identical to SEQ ID NO: 2346
  source: /note="Description of Artificial Sequence: Synthetic oligonucleotide"

SEQ ID NO: 2486 - DNA, 67 bp, Artificial Sequence; identical to SEQ ID NO: 2350
  source: /note="Description of Artificial Sequence: Synthetic oligonucleotide"

SEQ ID NO: 2487 - DNA, 76 bp, Artificial Sequence; identical to SEQ ID NO: 2348
  source: /note="Description of Artificial Sequence: Synthetic oligonucleotide"

SEQ ID NO: 2488 - DNA, 78 bp, Artificial Sequence; identical to SEQ ID NO: 2349
  source: /note="Description of Artificial Sequence: Synthetic oligonucleotide"

SEQ ID NO: 2489 - DNA, 67 bp, Artificial Sequence; identical to SEQ ID NO: 2347
  source: /note="Description of Artificial Sequence: Synthetic oligonucleotide"

SEQ ID NO: 2490 - DNA, 80 bp, Artificial Sequence; identical to SEQ ID NO: 2484
  source: /note="Description of Artificial Sequence: Synthetic oligonucleotide"

SEQ ID NO: 2491 - DNA, 67 bp, Artificial Sequence; identical to SEQ ID NO: 2350
  source: /note="Description of Artificial Sequence: Synthetic oligonucleotide"

SEQ ID NO: 2492 - DNA, 79 bp, Artificial Sequence; identical to SEQ ID NO: 2346
  source: /note="Description of Artificial Sequence: Synthetic oligonucleotide"

SEQ ID NO: 2493 - DNA, 76 bp, Artificial Sequence; identical to SEQ ID NO: 2348
  source: /note="Description of Artificial Sequence: Synthetic oligonucleotide"

SEQ ID NO: 2494 - DNA, 78 bp, Artificial Sequence; identical to SEQ ID NO: 2349
  source: /note="Description of Artificial Sequence: Synthetic oligonucleotide"

SEQ ID NO: 2495 - DNA, 67 bp, Artificial Sequence; identical to SEQ ID NO: 2347
  source: /note="Description of Artificial Sequence: Synthetic oligonucleotide"

SEQ ID NO: 2496 - DNA, 80 bp, Artificial Sequence; identical to SEQ ID NO: 2484
  source: /note="Description of Artificial Sequence: Synthetic oligonucleotide"

SEQ ID NO: 2497 - DNA, 76 bp, Artificial Sequence; identical to SEQ ID NO: 2348
  source: /note="Description of Artificial Sequence: Synthetic oligonucleotide"

SEQ ID NO: 2498 - DNA, 67 bp, Artificial Sequence; identical to SEQ ID NO: 2350
  source: /note="Description of Artificial Sequence: Synthetic oligonucleotide"

SEQ ID NO: 2499 - DNA, 79 bp, Artificial Sequence; identical to SEQ ID NO: 2346
  source: /note="Description of Artificial Sequence: Synthetic oligonucleotide"

SEQ ID NO: 2500 - DNA, 80 bp, Artificial Sequence
  source: /note="Description of Artificial Sequence: Synthetic oligonucleotide"
ttctgtcatgtgtgtcttgactcagaaaccttgttctcctctacatatctccccaccgcatctctttcagcagttgtttc

SEQ ID NO: 2501 - DNA, 67 bp, Artificial Sequence; identical to SEQ ID NO: 2347
  source: /note="Description of Artificial Sequence: Synthetic oligonucleotide"

SEQ ID NO: 2502 - DNA, 80 bp, Artificial Sequence; identical to SEQ ID NO: 2484
  source: /note="Description of Artificial Sequence: Synthetic oligonucleotide"

SEQ ID NO: 2503 - DNA, 79 bp, Artificial Sequence; identical to SEQ ID NO: 2346
  source: /note="Description of Artificial Sequence: Synthetic oligonucleotide"

SEQ ID NO: 2504 - DNA, 67 bp, Artificial Sequence; identical to SEQ ID NO: 2350
  source: /note="Description of Artificial Sequence: Synthetic oligonucleotide"

SEQ ID NO: 2505 - DNA, 76 bp, Artificial Sequence; identical to SEQ ID NO: 2348
  source: /note="Description of Artificial Sequence: Synthetic oligonucleotide"

SEQ ID NO: 2506 - DNA, 78 bp, Artificial Sequence; identical to SEQ ID NO: 2349
  source: /note="Description of Artificial Sequence: Synthetic oligonucleotide"

SEQ ID NO: 2507 - DNA, 67 bp, Artificial Sequence; identical to SEQ ID NO: 2347
  source: /note="Description of Artificial Sequence: Synthetic oligonucleotide"

SEQ ID NO: 2508 - DNA, 67 bp, Artificial Sequence; identical to SEQ ID NO: 2350
  source: /note="Description of Artificial Sequence: Synthetic oligonucleotide"

SEQ ID NO: 2509 - DNA, 80 bp, Artificial Sequence; identical to SEQ ID NO: 2484
  source: /note="Description of Artificial Sequence: Synthetic oligonucleotide"

SEQ ID NO: 2510 - DNA, 76 bp, Artificial Sequence; identical to SEQ ID NO: 2348
  source: /note="Description of Artificial Sequence: Synthetic oligonucleotide"

SEQ ID NO: 2511 - DNA, 78 bp, Artificial Sequence; identical to SEQ ID NO: 2349
  source: /note="Description of Artificial Sequence: Synthetic oligonucleotide"

SEQ ID NO: 2512 - DNA, 79 bp, Artificial Sequence; identical to SEQ ID NO: 2346
  source: /note="Description of Artificial Sequence: Synthetic oligonucleotide"

SEQ ID NO: 2513 - DNA, 67 bp, Artificial Sequence; identical to SEQ ID NO: 2347
  source: /note="Description of Artificial Sequence: Synthetic oligonucleotide"

SEQ ID NO: 2514 - DNA, 80 bp, Artificial Sequence; identical to SEQ ID NO: 2484
  source: /note="Description of Artificial Sequence: Synthetic oligonucleotide"

SEQ ID NO: 2515 - DNA, 79 bp, Artificial Sequence; identical to SEQ ID NO: 2346
  source: /note="Description of Artificial Sequence: Synthetic oligonucleotide"

SEQ ID NO: 2516 - DNA, 78 bp, Artificial Sequence; identical to SEQ ID NO: 2349
  source: /note="Description of Artificial Sequence: Synthetic oligonucleotide"

SEQ ID NO: 2517 - DNA, 67 bp, Artificial Sequence; identical to SEQ ID NO: 2350
  source: /note="Description of Artificial Sequence: Synthetic oligonucleotide"

SEQ ID NO: 2518 - DNA, 76 bp, Artificial Sequence; identical to SEQ ID NO: 2348
  source: /note="Description of Artificial Sequence: Synthetic oligonucleotide"

SEQ ID NO: 2519 - DNA, 67 bp, Artificial Sequence; identical to SEQ ID NO: 2356
  source: /note="Description of Artificial Sequence: Synthetic oligonucleotide"

SEQ ID NO: 2520 - DNA, 80 bp, Artificial Sequence
  source: /note="Description of Artificial Sequence: Synthetic oligonucleotide"
tcttgactcagaaaccctgttctcctctgcatatctccccaccgcatctctttcagcagttgtttctaaaaatatcctcc

SEQ ID NO: 2521 - DNA, 75 bp, Artificial Sequence; identical to SEQ ID NO: 2360
  source: /note="Description of Artificial Sequence: Synthetic oligonucleotide"

SEQ ID NO: 2522 - DNA, 79 bp, Artificial Sequence; identical to SEQ ID NO: 2357
  source: /note="Description of Artificial Sequence: Synthetic oligonucleotide"

SEQ ID NO: 2523 - DNA, 80 bp, Artificial Sequence
  source: /note="Description of Artificial Sequence: Synthetic oligonucleotide"
tcttgactcagaaaccttgttctcctctacatatctccccaccgcatctctttcagcagttgtttctaaaaatatcctcc

SEQ ID NO: 2524 - DNA, 78 bp, Artificial Sequence; identical to SEQ ID NO: 2358
  source: /note="Description of Artificial Sequence: Synthetic oligonucleotide"

SEQ ID NO: 2525 - DNA, 67 bp, Artificial Sequence; identical to SEQ ID NO: 2356
  source: /note="Description of Artificial Sequence: Synthetic oligonucleotide"

SEQ ID NO: 2526 - DNA, 81 bp, Artificial Sequence; identical to SEQ ID NO: 2359
  source: /note="Description of Artificial Sequence: Synthetic oligonucleotide"

SEQ ID NO: 2527 - DNA, 79 bp, Artificial Sequence; identical to SEQ ID NO: 2365
  source: /note="Description of Artificial Sequence: Synthetic oligonucleotide"

SEQ ID NO: 2528 - DNA, 78 bp, Artificial Sequence; identical to SEQ ID NO: 2358
  source: /note="Description of Artificial Sequence: Synthetic oligonucleotide"

SEQ ID NO: 2529 - DNA, 75 bp, Artificial Sequence; identical to SEQ ID NO: 2360
  source: /note="Description of Artificial Sequence: Synthetic oligonucleotide"

SEQ ID NO: 2530 - DNA, 65 bp, Artificial Sequence
  source: /note="Description of Artificial Sequence: Synthetic oligonucleotide"
tcttgactcagaaaccctgttctcctctacatatctttcagcagttgtttctaaaaatatcctcc

SEQ ID NO: 2531 - DNA, 67 bp, Artificial Sequence; identical to SEQ ID NO: 2356
  source: /note="Description of Artificial Sequence: Synthetic oligonucleotide"

SEQ ID NO: 2532 - DNA, 81 bp, Artificial Sequence; identical to SEQ ID NO: 2359
  source: /note="Description of Artificial Sequence: Synthetic oligonucleotide"

SEQ ID NO: 2533 - DNA, 79 bp, Artificial Sequence; identical to SEQ ID NO: 2357
  source: /note="Description of Artificial Sequence: Synthetic oligonucleotide"

SEQ ID NO: 2534 - DNA, 78 bp, Artificial Sequence; identical to SEQ ID NO: 2358
  source: /note="Description of Artificial Sequence: Synthetic oligonucleotide"

SEQ ID NO: 2535 - DNA, 80 bp, Artificial Sequence; identical to SEQ ID NO: 2520
  source: /note="Description of Artificial Sequence: Synthetic oligonucleotide"

SEQ ID NO: 2536 - DNA, 75 bp, Artificial Sequence; identical to SEQ ID NO: 2360
  source: /note="Description of Artificial Sequence: Synthetic oligonucleotide"

SEQ ID NO: 2537 - DNA, 67 bp, Artificial Sequence; identical to SEQ ID NO: 2356
  source: /note="Description of Artificial Sequence: Synthetic oligonucleotide"

SEQ ID NO: 2538 - DNA, 79 bp, Artificial Sequence; identical to SEQ ID NO: 2357
  source: /note="Description of Artificial Sequence: Synthetic oligonucleotide"

SEQ ID NO: 2539 - DNA, 81 bp, Artificial Sequence; identical to SEQ ID NO: 2359
  source: /note="Description of Artificial Sequence: Synthetic oligonucleotide"

SEQ ID NO: 2540 - DNA, 76 bp, Artificial Sequence
  source: /note="Description of Artificial Sequence: Synthetic oligonucleotide"
tcttgactcagaaaccctgttctcctctacatatctccccaccgtctttcagcagttgtttctaaaaatatcctcc

SEQ ID NO: 2541 - DNA, 74 bp, Artificial Sequence
  source: /note="Description of Artificial Sequence: Synthetic oligonucleotide"
tcttgactcagaaaccctgttctcctctacatatctccccactctttcagcagttgtttctaaaaatatcctcc

SEQ ID NO: 2542 - DNA, 65 bp, Artificial Sequence
  source: /note="Description of Artificial Sequence: Synthetic oligonucleotide"
tcttgactcagaaaccctgttctcctctgcatatctttcagcagttgtttctaaaaatatcctcc

SEQ ID NO: 2543 - DNA, 67 bp, Artificial Sequence; identical to SEQ ID NO: 2356
  source: /note="Description of Artificial Sequence: Synthetic oligonucleotide"

SEQ ID NO: 2544 - DNA, 80 bp, Artificial Sequence; identical to SEQ ID NO: 2520
  source: /note="Description of Artificial Sequence: Synthetic oligonucleotide"

SEQ ID NO: 2545 - DNA, 81 bp, Artificial Sequence; identical to SEQ ID NO: 2359
  source: /note="Description of Artificial Sequence: Synthetic oligonucleotide"

SEQ ID NO: 2546 - DNA, 79 bp, Artificial Sequence; identical to SEQ ID NO: 2365
  source: /note="Description of Artificial Sequence: Synthetic oligonucleotide"

SEQ ID NO: 2547 - DNA, 75 bp, Artificial Sequence; identical to SEQ ID NO: 2360
  source: /note="Description of Artificial Sequence: Synthetic oligonucleotide"

SEQ ID NO: 2548 - DNA, 79 bp, Artificial Sequence; identical to SEQ ID NO: 2357
  source: /note="Description of Artificial Sequence: Synthetic oligonucleotide"

SEQ ID NO: 2549 - DNA, 67 bp, Artificial Sequence; identical to SEQ ID NO: 2356
  source: /note="Description of Artificial Sequence: Synthetic oligonucleotide"

SEQ ID NO: 2550 - DNA, 80 bp, Artificial Sequence; identical to SEQ ID NO: 2520
  source: /note="Description of Artificial Sequence: Synthetic oligonucleotide"

SEQ ID NO: 2551 - DNA, 81 bp, Artificial Sequence; identical to SEQ ID NO: 2359
  source: /note="Description of Artificial Sequence: Synthetic oligonucleotide"

SEQ ID NO: 2552 - DNA, 75 bp, Artificial Sequence; identical to SEQ ID NO: 2360
  source: /note="Description of Artificial Sequence: Synthetic oligonucleotide"

SEQ ID NO: 2553 - DNA, 79 bp, Artificial Sequence; identical to SEQ ID NO: 2357
  source: /note="Description of Artificial Sequence: Synthetic oligonucleotide"

SEQ ID NO: 2554 - DNA, 78 bp, Artificial Sequence; identical to SEQ ID NO: 2358
  source: /note="Description of Artificial Sequence: Synthetic oligonucleotide"

SEQ ID NO: 2555 - DNA, 67 bp, Artificial Sequence; identical to SEQ ID NO: 2356
  source: /note="Description of Artificial Sequence: Synthetic oligonucleotide"

SEQ ID NO: 2556 - DNA, 79 bp, Artificial Sequence; identical to SEQ ID NO: 2357
  source: /note="Description of Artificial Sequence: Synthetic oligonucleotide"

SEQ ID NO: 2557 - DNA, 81 bp, Artificial Sequence; identical to SEQ ID NO: 2359
  source: /note="Description of Artificial Sequence: Synthetic oligonucleotide"

SEQ ID NO: 2558 - DNA, 78 bp, Artificial Sequence; identical to SEQ ID NO: 2358
  source: /note="Description of Artificial Sequence: Synthetic oligonucleotide"

SEQ ID NO: 2559 - DNA, 75 bp, Artificial Sequence; identical to SEQ ID NO: 2360
  source: /note="Description of Artificial Sequence: Synthetic oligonucleotide"

SEQ ID NO: 2560 - DNA, 65 bp, Artificial Sequence
  source: /note="Description of Artificial Sequence: Synthetic oligonucleotide"
tcttgactcagaaaccctgttctcctctacatctctttcagcagttgtttctaaaaatatcctcc

SEQ ID NO: 2561 - DNA, 54 bp, Artificial Sequence
  source: /note="Description of Artificial Sequence: Synthetic oligonucleotide"
tcttgactcagaaaccctgttctctttcagcagttgtttctaaaaatatcctcc

SEQ ID NO: 2562 - DNA, 67 bp, Artificial Sequence; identical to SEQ ID NO: 2356
  source: /note="Description of Artificial Sequence: Synthetic oligonucleotide"

SEQ ID NO: 2563 - DNA, 79 bp, Artificial Sequence; identical to SEQ ID NO: 2357
  source: /note="Description of Artificial Sequence: Synthetic oligonucleotide"

SEQ ID NO: 2564 - DNA, 81 bp, Artificial Sequence; identical to SEQ ID NO: 2359
  source: /note="Description of Artificial Sequence: Synthetic oligonucleotide"

SEQ ID NO: 2565 - DNA, 75 bp, Artificial Sequence; identical to SEQ ID NO: 2360
  source: /note="Description of Artificial Sequence: Synthetic oligonucleotide"

SEQ ID NO: 2566 - DNA, 79 bp, Artificial Sequence; identical to SEQ ID NO: 2365
  source: /note="Description of Artificial Sequence: Synthetic oligonucleotide"

SEQ ID NO: 2567 - DNA, 74 bp, Artificial Sequence; identical to SEQ ID NO: 2541
  source: /note="Description of Artificial Sequence: Synthetic oligonucleotide"

SEQ ID NO: 2568 - DNA, 81 bp, Artificial Sequence; identical to SEQ ID NO: 2407
  source: /note="Description of Artificial Sequence: Synthetic oligonucleotide"

SEQ ID NO: 2569 - DNA, 73 bp, Artificial Sequence; identical to SEQ ID NO: 2406
  source: /note="Description of Artificial Sequence: Synthetic oligonucleotide"

SEQ ID NO: 2570 - DNA, 81 bp, Artificial Sequence; identical to SEQ ID NO: 2408
  source: /note="Description of Artificial Sequence: Synthetic oligonucleotide"

SEQ ID NO: 2571 - DNA, 72 bp, Artificial Sequence; identical to SEQ ID NO: 2414
  source: /note="Description of Artificial Sequence: Synthetic oligonucleotide"

SEQ ID NO: 2572 - DNA, 73 bp, Artificial Sequence; identical to SEQ ID NO: 2415
  source: /note="Description of Artificial Sequence: Synthetic oligonucleotide"

SEQ ID NO: 2573 - DNA, 74 bp, Artificial Sequence
  source: /note="Description of Artificial Sequence: Synthetic oligonucleotide"
aaatgcttatgacagcaataatcataaaaacctcaaagccacttaaatgcttaccaacagtagaattgataaat

SEQ ID NO: 2574 - DNA, 79 bp, Artificial Sequence
  source: /note="Description of Artificial Sequence: Synthetic oligonucleotide"
aaatgcttatgacagcaataatcataaaaacctcaaaccggtgccacttaaatgcttaccaacagtagaattgataaat

SEQ ID NO: 2575 - DNA, 81 bp, Artificial Sequence; identical to SEQ ID NO: 2407
  source: /note="Description of Artificial Sequence: Synthetic oligonucleotide"

SEQ ID NO: 2576 - DNA, 73 bp, Artificial Sequence; identical to SEQ ID NO: 2406
  source: /note="Description of Artificial Sequence: Synthetic oligonucleotide"

SEQ ID NO: 2577 - DNA, 73 bp, Artificial Sequence
  source: /note="Description of Artificial Sequence: Synthetic oligonucleotide"
aaatgcttatgacagcaataatcataaaaacctcaagccacttaaatgcttaccaacagtagaattgataaat

SEQ ID NO: 2578 - DNA, 72 bp, Artificial Sequence; identical to SEQ ID NO: 2414
  source: /note="Description of Artificial Sequence: Synthetic oligonucleotide"

SEQ ID NO: 2579 - DNA, 81 bp, Artificial Sequence; identical to SEQ ID NO: 2408
  source: /note="Description of Artificial Sequence: Synthetic oligonucleotide"

SEQ ID NO: 2580 - DNA, 45 bp, Artificial Sequence
  source: /note="Description of Artificial Sequence: Synthetic oligonucleotide"
aaatgcttatgacagcaataattaccaacagtagaattgataaat

SEQ ID NO: 2581 - DNA, 64 bp, Artificial Sequence
  source: /note="Description of Artificial Sequence: Synthetic oligonucleotide"
aaatgcttatgacagcaataatcataaaaacctcaaatgcttaccaacagtagaattgataaat

SEQ ID NO: 2582 - DNA, 81 bp, Artificial Sequence; identical to SEQ ID NO: 2407
  source: /note="Description of Artificial Sequence: Synthetic oligonucleotide"

SEQ ID NO: 2583 - DNA, 73 bp, Artificial Sequence; identical to SEQ ID NO: 2406
  source: /note="Description of Artificial Sequence: Synthetic oligonucleotide"

SEQ ID NO: 2584 - DNA, 72 bp, Artificial Sequence; identical to SEQ ID NO: 2414
  source: /note="Description of Artificial Sequence: Synthetic oligonucleotide"

SEQ ID NO: 2585 - DNA, 73 bp, Artificial Sequence; identical to SEQ ID NO: 2415
  source: /note="Description of Artificial Sequence: Synthetic oligonucleotide"

SEQ ID NO: 2586 - DNA, 81 bp, Artificial Sequence; identical to SEQ ID NO: 2408
  source: /note="Description of Artificial Sequence: Synthetic oligonucleotide"

SEQ ID NO: 2587 - DNA, 73 bp, Artificial Sequence; identical to SEQ ID NO: 2577
  source: /note="Description of Artificial Sequence: Synthetic oligonucleotide"

SEQ ID NO: 2588 - DNA, 72 bp, Artificial Sequence; identical to SEQ ID NO: 2409
  source: /note="Description of Artificial Sequence: Synthetic oligonucleotide"

SEQ ID NO: 2589 - DNA, 73 bp, Artificial Sequence; identical to SEQ ID NO: 2406
  source: /note="Description of Artificial Sequence: Synthetic oligonucleotide"

SEQ ID NO: 2590 - DNA, 81 bp, Artificial Sequence; identical to SEQ ID NO: 2407
  source: /note="Description of Artificial Sequence: Synthetic oligonucleotide"

SEQ ID NO: 2591 - DNA, 72 bp, Artificial Sequence; identical to SEQ ID NO: 2414
  source: /note="Description of Artificial Sequence: Synthetic oligonucleotide"

SEQ ID NO: 2592 - DNA, 81 bp, Artificial Sequence; identical to SEQ ID NO: 2408
  source: /note="Description of Artificial Sequence: Synthetic oligonucleotide"

SEQ ID NO: 2593 - DNA, 77 bp, Artificial Sequence
  source: /note="Description of Artificial Sequence: Synthetic oligonucleotide"
aaatgcttatgacagcaataatcataaaaacctcaaaccggccacttaaatgcttaccaacagtagaattgataaat

SEQ ID NO: 2594 - DNA, 70 bp, Artificial Sequence
  source: /note="Description of Artificial Sequence: Synthetic oligonucleotide"
aaatgcttatgacagcaataatcataaaaacctcaaacttaaatgcttaccaacagtagaattgataaat

SEQ ID NO: 2595 - DNA, 73 bp, Artificial Sequence; identical to SEQ ID NO: 2415
  source: /note="Description of Artificial Sequence: Synthetic oligonucleotide"

SEQ ID NO: 2596 - DNA, 81 bp, Artificial Sequence; identical to SEQ ID NO: 2407
  source: /note="Description of Artificial Sequence: Synthetic oligonucleotide"

SEQ ID NO: 2597 - DNA, 73 bp, Artificial Sequence; identical to SEQ ID NO: 2406
  source: /note="Description of Artificial Sequence: Synthetic oligonucleotide"

SEQ ID NO: 2598 - DNA, 55 bp, Artificial Sequence
  source: /note="Description of Artificial Sequence: Synthetic oligonucleotide"
aaatgcttatgacagcaataatcataaaaacctcaaaccggtagaattgataaat

SEQ ID NO: 2599 - DNA, 79 bp, Artificial Sequence; identical to SEQ ID NO: 2574
  source: /note="Description of Artificial Sequence: Synthetic oligonucleotide"

SEQ ID NO: 2600 - DNA, 81 bp, Artificial Sequence; identical to SEQ ID NO: 2408
  source: /note="Description of Artificial Sequence: Synthetic oligonucleotide"

SEQ ID NO: 2601 - DNA, 79 bp, Artificial Sequence
  source: /note="Description of Artificial Sequence: Synthetic oligonucleotide"
aaatgcttatgacagcaataatcataaaaacctcaaaccggtaccacttaaatgcttaccaacagtagaattgataaat

SEQ ID NO: 2602 - DNA, 77 bp, Artificial Sequence
  source: /note="Description of Artificial Sequence: Synthetic oligonucleotide"
aaatgcttatgacagcaataatcataaaaacctcaaaccggtaacttaaatgcttaccaacagtagaattgataaat

SEQ ID NO: 2603 - DNA, 73 bp, Artificial Sequence; identical to SEQ ID NO: 2406
  source: /note="Description of Artificial Sequence: Synthetic oligonucleotide"

SEQ ID NO: 2604 - DNA, 81 bp, Artificial Sequence; identical to SEQ ID NO: 2407
  source: /note="Description of Artificial Sequence: Synthetic oligonucleotide"

SEQ ID NO: 2605 - DNA, 81 bp, Artificial Sequence; identical to SEQ ID NO: 2408
  source: /note="Description of Artificial Sequence: Synthetic oligonucleotide"

SEQ ID NO: 2606 - DNA, 73 bp, Artificial Sequence; identical to SEQ ID NO: 2415
  source: /note="Description of Artificial Sequence: Synthetic oligonucleotide"

SEQ ID NO: 2607 - DNA, 72 bp, Artificial Sequence; identical to SEQ ID NO: 2414
  source: /note="Description of Artificial Sequence: Synthetic oligonucleotide"

SEQ ID NO: 2608 - DNA, 76 bp, Artificial Sequence
  source: /note="Description of Artificial Sequence: Synthetic oligonucleotide"
aaatgcttatgacagcaataatcataaaaacctcaaaccggtacttaaatgcttaccaacagtagaattgataaat

SEQ ID NO: 2609 - DNA, 81 bp, Artificial Sequence
  source: /note="Description of Artificial Sequence: Synthetic oligonucleotide"
aaatgcttatgacagcaataatcataaaaacctcaaaccggtatgccacttaaatgcttaccaacagtagaattgataaat

SEQ ID NO: 2610 - DNA, 76 bp, Artificial Sequence; identical to SEQ ID NO: 2456
  source: /note="Description of Artificial Sequence: Synthetic oligonucleotide"

SEQ ID NO: 2611 - DNA, 79 bp, Artificial Sequence; identical to SEQ ID NO: 2457
  source: /note="Description of Artificial Sequence: Synthetic oligonucleotide"

SEQ ID NO: 2612 - DNA, 75 bp, Artificial Sequence; identical to SEQ ID NO: 2458
  source: /note="Description of Artificial Sequence: Synthetic oligonucleotide"

SEQ ID NO: 2613 - DNA, 70 bp, Artificial Sequence
  source: /note="Description of Artificial Sequence: Synthetic oligonucleotide"
tagcatctactcttgttcaggaaacaatgagggcagtaagagtggtgattaatagatagggacaaattga

SEQ ID NO: 2614 - DNA, 70 bp, Artificial Sequence; identical to SEQ ID NO: 2464
  source: /note="Description of Artificial Sequence: Synthetic oligonucleotide"

SEQ ID NO: 2615 - DNA, 55 bp, Artificial Sequence
  source: /note="Description of Artificial Sequence: Synthetic oligonucleotide"
tagcatctactcttgttcaggtaagagtggtgattaatagatagggacaaattga

SEQ ID NO: 2616 - DNA, 80 bp, Artificial Sequence
  source: /note="Description of Artificial Sequence: Synthetic oligonucleotide"
tagcatctactcttgttcaggaaacaatgaggaccttactgggcagtaagagtggtgattaatagatagggacaaattga

SEQ ID NO: 2617 - DNA, 76 bp, Artificial Sequence; identical to SEQ ID NO: 2456
  source: /note="Description of Artificial Sequence: Synthetic oligonucleotide"

SEQ ID NO: 2618 - DNA, 79 bp, Artificial Sequence; identical to SEQ ID NO: 2457
  source: /note="Description of Artificial Sequence: Synthetic oligonucleotide"

SEQ ID NO: 2619 - DNA, 75 bp, Artificial Sequence; identical to SEQ ID NO: 2458
  source: /note="Description of Artificial Sequence: Synthetic oligonucleotide"

SEQ ID NO: 2620 - DNA, 78 bp, Artificial Sequence
  source: /note="Description of Artificial Sequence: Synthetic oligonucleotide"
tagcatctactcttgttcaggaaacaatgaggacctgtgggcagtaagagtggtgattaatagatagggacaaattga

SEQ ID NO: 2621 - DNA, 81 bp, Artificial Sequence
  source: /note="Description of Artificial Sequence: Synthetic oligonucleotide"
tagcatctactcttgttcaggaaacaatgaggacctgtactgggcagtaagagtggtgattaatagatagggacaaattga

SEQ ID NO: 2622 - DNA, 70 bp, Artificial Sequence; identical to SEQ ID NO: 2464
  source: /note="Description of Artificial Sequence: Synthetic oligonucleotide"

SEQ ID NO: 2623 - DNA, 81 bp, Artificial Sequence
  source: /note="Description of Artificial Sequence: Synthetic oligonucleotide"
tagcatctactcttgttcaggaaacaatgaggacctgaactgggcagtaagagtggtgattaatagatagggacaaattga

SEQ ID NO: 2624 - DNA, 76 bp, Artificial Sequence; identical to SEQ ID NO: 2456
  source: /note="Description of Artificial Sequence: Synthetic oligonucleotide"

SEQ ID NO: 2625 - DNA, 79 bp, Artificial Sequence; identical to SEQ ID NO: 2457
  source: /note="Description of Artificial Sequence: Synthetic oligonucleotide"

SEQ ID NO: 2626 - DNA, 75 bp, Artificial Sequence; identical to SEQ ID NO: 2458
  source: /note="Description of Artificial Sequence: Synthetic oligonucleotide"

SEQ ID NO: 2627 - DNA, 69 bp, Artificial Sequence; identical to SEQ ID NO: 2459
  source: /note="Description of Artificial Sequence: Synthetic oligonucleotide"

SEQ ID NO: 2628 - DNA, 70 bp, Artificial Sequence; identical to SEQ ID NO: 2613
  source: /note="Description of Artificial Sequence: Synthetic oligonucleotide"

SEQ ID NO: 2629 - DNA, 81 bp, Artificial Sequence; identical to SEQ ID NO: 2621
  source: /note="Description of Artificial Sequence: Synthetic oligonucleotide"

SEQ ID NO: 2630 - DNA, 68 bp, Artificial Sequence; identical to SEQ ID NO: 2460
  source: /note="Description of Artificial Sequence: Synthetic oligonucleotide"

SEQ ID NO: 2631 - DNA, 76 bp, Artificial Sequence; identical to SEQ ID NO: 2456
  source: /note="Description of Artificial Sequence: Synthetic oligonucleotide"

SEQ ID NO: 2632 - DNA, 79 bp, Artificial Sequence; identical to SEQ ID NO: 2457
  source: /note="Description of Artificial Sequence: Synthetic oligonucleotide"

SEQ ID NO: 2633 - DNA, 75 bp, Artificial Sequence; identical to SEQ ID NO: 2458
  source: /note="Description of Artificial Sequence: Synthetic oligonucleotide"

SEQ ID NO: 2634 - DNA, 70 bp, Artificial Sequence; identical to SEQ ID NO: 2464
  source: /note="Description of Artificial Sequence: Synthetic oligonucleotide"

SEQ ID NO: 2635 - DNA, 81 bp, Artificial Sequence; identical to SEQ ID NO: 2621
  source: /note="Description of Artificial Sequence: Synthetic oligonucleotide"

SEQ ID NO: 2636 - DNA, 68 bp, Artificial Sequence; identical to SEQ ID NO: 2460
  source: /note="Description of Artificial Sequence: Synthetic oligonucleotide"

SEQ ID NO: 2637 - DNA, 69 bp, Artificial Sequence; identical to SEQ ID NO: 2459
  source: /note="Description of Artificial Sequence: Synthetic oligonucleotide"

SEQ ID NO: 2638 - DNA, 76 bp, Artificial Sequence; identical to SEQ ID NO: 2456
  source: /note="Description of Artificial Sequence: Synthetic oligonucleotide"

SEQ ID NO: 2639 - DNA, 79 bp, Artificial Sequence; identical to SEQ ID NO: 2457
  source: /note="Description of Artificial Sequence: Synthetic oligonucleotide"

SEQ ID NO: 2640 - DNA, 75 bp, Artificial Sequence; identical to SEQ ID NO: 2458
  source: /note="Description of Artificial Sequence: Synthetic oligonucleotide"

SEQ ID NO: 2641 - DNA, 81 bp, Artificial Sequence; identical to SEQ ID NO: 2621
  source: /note="Description of Artificial Sequence: Synthetic oligonucleotide"

SEQ ID NO: 2642 - DNA, 78 bp, Artificial Sequence
  source: /note="Description of Artificial Sequence: Synthetic oligonucleotide"
tagcatctactcttgttcaggaaacaatgaggaccactgggcagtaagagtggtgattaatagatagggacaaattga

SEQ ID NO: 2643 - DNA, 70 bp, Artificial Sequence; identical to SEQ ID NO: 2464
  source: /note="Description of Artificial Sequence: Synthetic oligonucleotide"

SEQ ID NO: 2644 - DNA, 72 bp, Artificial Sequence
  source: /note="Description of Artificial Sequence: Synthetic oligonucleotide"
tagcatctactcttgttcaggaaacaatgaggacctggtaagagtggtgattaatagatagggacaaattga

SEQ ID NO: 2645 - DNA, 76 bp, Artificial Sequence; identical to SEQ ID NO: 2456
  source: /note="Description of Artificial Sequence: Synthetic oligonucleotide"

SEQ ID NO: 2646 - DNA, 79 bp, Artificial Sequence; identical to SEQ ID NO: 2457
  source: /note="Description of Artificial Sequence: Synthetic oligonucleotide"

SEQ ID NO: 2647 - DNA, 75 bp, Artificial Sequence; identical to SEQ ID NO: 2458
  source: /note="Description of Artificial Sequence: Synthetic oligonucleotide"

SEQ ID NO: 2648 - DNA, 70 bp, Artificial Sequence; identical to SEQ ID NO: 2464
  source: /note="Description of Artificial Sequence: Synthetic oligonucleotide"

SEQ ID NO: 2649 - DNA, 69 bp, Artificial Sequence; identical to SEQ ID NO: 2459
  source: /note="Description of Artificial Sequence: Synthetic oligonucleotide"

SEQ ID NO: 2650 - DNA, 71 bp, Artificial Sequence
  source: /note="Description of Artificial Sequence: Synthetic oligonucleotide"
tagcatctactcttgttcaggaaacaatgaggacctgtaagagtggtgattaatagatagggacaaattga

SEQ ID NO: 2651 - DNA, 68 bp, Artificial Sequence; identical to SEQ ID NO: 2460
  source: /note="Description of Artificial Sequence: Synthetic oligonucleotide"

SEQ ID NO: 2652 - DNA, 77 bp, Artificial Sequence
  source: /note="Description of Artificial Sequence: Synthetic oligonucleotide"
ctggaagagaaacagttttagtataacaagtgaaatacccatgagtctgaggtgcctataggacatctatataaata

SEQ ID NO: 2653 - DNA, 80 bp, Artificial Sequence
  source: /note="Description of Artificial Sequence: Synthetic oligonucleotide"
ctggaagagaaatagttttagtataacaagtgaaatacccatgctgagtctgaggtgcctataggacatctatataaata

SEQ ID NO: 2654 - DNA, 77 bp, Artificial Sequence
  source: /note="Description of Artificial Sequence: Synthetic oligonucleotide"
ctggaagagaaatagttttagtataacaagtgaaatacccatgagtctgaggtgcctataggacatctatataaata

SEQ ID NO: 2655 - DNA, 79 bp, Artificial Sequence
  source: /note="Description of Artificial Sequence: Synthetic oligonucleotide"
ctggaagagaaacagttttagtataacaagtgaaatacccatctgagtctgaggtgcctataggacatctatataaata

SEQ ID NO: 2656 - DNA, 66 bp, Artificial Sequence
  source: /note="Description of Artificial Sequence: Synthetic oligonucleotide"
ctggaagagaaacagttttagtataacaagtgagtctgaggtgcctataggacatctatataaata

SEQ ID NO: 2657 - DNA, 78 bp, Artificial Sequence
  source: /note="Description of Artificial Sequence: Synthetic oligonucleotide"
ctggaagagaaacagttttagtataacaagtgaaatacccatggagtctgaggtgcctataggacatctatataaata

SEQ ID NO: 2658 - DNA, 74 bp, Artificial Sequence
  source: /note="Description of Artificial Sequence: Synthetic oligonucleotide"
ctggaagagaaacagttttagtataacaagtgaaatactgagtctgaggtgcctataggacatctatataaata

SEQ ID NO: 2659 - DNA, 77 bp, Artificial Sequence; identical to SEQ ID NO: 2652
  source: /note="Description of Artificial Sequence: Synthetic oligonucleotide"

SEQ ID NO: 2660 - DNA, 78 bp, Artificial Sequence
  source: /note="Description of Artificial Sequence: Synthetic oligonucleotide"
ctggaagagaaacagttttagtataacaagtgaaatacccactgagtctgaggtgcctataggacatctatataaata

SEQ ID NO: 2661 - DNA, 79 bp, Artificial Sequence; identical to SEQ ID NO: 2655
  source: /note="Description of Artificial Sequence: Synthetic oligonucleotide"

SEQ ID NO: 2662 - DNA, 78 bp, Artificial Sequence; identical to SEQ ID NO: 2657
  source: /note="Description of Artificial Sequence: Synthetic oligonucleotide"

SEQ ID NO: 2663 - DNA, 66 bp, Artificial Sequence; identical to SEQ ID NO: 2656
  source: /note="Description of Artificial Sequence: Synthetic oligonucleotide"

SEQ ID NO: 2664 - DNA, 77 bp, Artificial Sequence; identical to SEQ ID NO: 2654
  source: /note="Description of Artificial Sequence: Synthetic oligonucleotide"

SEQ ID NO: 2665 - DNA, 79 bp, Artificial Sequence
  source: /note="Description of Artificial Sequence: Synthetic oligonucleotide"
ctggaagagaaacagttttagtataacaagtgaaatacccatgtgagtctgaggtgcctataggacatctatataaata

SEQ ID NO: 2666 - DNA, 77 bp, Artificial Sequence; identical to SEQ ID NO: 2652
  source: /note="Description of Artificial Sequence: Synthetic oligonucleotide"

SEQ ID NO: 2667 - DNA, 80 bp, Artificial Sequence; identical to SEQ ID NO: 2653
  source: /note="Description of Artificial Sequence: Synthetic oligonucleotide"

SEQ ID NO: 2668 - DNA, 77 bp, Artificial Sequence; identical to SEQ ID NO: 2654
  source: /note="Description of Artificial Sequence: Synthetic oligonucleotide"

SEQ ID NO: 2669 - DNA, 79 bp, Artificial Sequence; identical to SEQ ID NO: 2655
  source: /note="Description of Artificial Sequence: Synthetic oligonucleotide"

SEQ ID NO: 2670 - DNA, 78 bp, Artificial Sequence; identical to SEQ ID NO: 2660
  source: /note="Description of Artificial Sequence: Synthetic oligonucleotide"

SEQ ID NO: 2671 - DNA, 66 bp, Artificial Sequence; identical to SEQ ID NO: 2656
  source: /note="Description of Artificial Sequence: Synthetic oligonucleotide"

SEQ ID NO: 2672 - DNA, 75 bp, Artificial Sequence
  source: /note="Description of Artificial Sequence: Synthetic oligonucleotide"
ctggaagagaaacagttttagtataacaagtgaaatacctgagtctgaggtgcctataggacatctatataaata

SEQ ID NO: 2673 - DNA, 77 bp, Artificial Sequence; identical to SEQ ID NO: 2652
  source: /note="Description of Artificial Sequence: Synthetic oligonucleotide"

SEQ ID NO: 2674 - DNA, 77 bp, Artificial Sequence; identical to SEQ ID NO: 2654
  source: /note="Description of Artificial Sequence: Synthetic oligonucleotide"

SEQ ID NO: 2675 - DNA, 80 bp, Artificial Sequence; identical to SEQ ID NO: 2653
  source: /note="Description of Artificial Sequence: Synthetic oligonucleotide"

SEQ ID NO: 2676 - DNA, 79 bp, Artificial Sequence; identical to SEQ ID NO: 2655
  source: /note="Description of Artificial Sequence: Synthetic oligonucleotide"

SEQ ID NO: 2677 - DNA, 78 bp, Artificial Sequence; identical to SEQ ID NO: 2657
  source: /note="Description of Artificial Sequence: Synthetic oligonucleotide"

SEQ ID NO: 2678 - DNA, 78 bp, Artificial Sequence; identical to SEQ ID NO: 2660
  source: /note="Description of Artificial Sequence: Synthetic oligonucleotide"

SEQ ID NO: 2679 - DNA, 79 bp, Artificial Sequence
  source: /note="Description of Artificial Sequence: Synthetic oligonucleotide"
ctggaagagaaatagttttagtataacaagtgaaatacccatctgagtctgaggtgcctataggacatctatataaata

SEQ ID NO: 2680 - DNA, 79 bp, Artificial Sequence; identical to SEQ ID NO: 2655
  source: /note="Description of Artificial Sequence: Synthetic oligonucleotide"

SEQ ID NO: 2681 - DNA, 77 bp, Artificial Sequence; identical to SEQ ID NO: 2652
  source: /note="Description of Artificial Sequence: Synthetic oligonucleotide"

SEQ ID NO: 2682 - DNA, 78 bp, Artificial Sequence; identical to SEQ ID NO: 2657
  source: /note="Description of Artificial Sequence: Synthetic oligonucleotide"

SEQ ID NO: 2683 - DNA, 78 bp, Artificial Sequence; identical to SEQ ID NO: 2660
  source: /note="Description of Artificial Sequence: Synthetic oligonucleotide"

SEQ ID NO: 2684 - DNA, 79 bp, Artificial Sequence; identical to SEQ ID NO: 2679
  source: /note="Description of Artificial Sequence: Synthetic oligonucleotide"

SEQ ID NO: 2685 - DNA, 76 bp, Artificial Sequence
  source: /note="Description of Artificial Sequence: Synthetic oligonucleotide"
ctggaagagaaacagttttagtataacaagtgaaataccctgagtctgaggtgcctataggacatctatataaata

SEQ ID NO: 2686 - DNA, 75 bp, Artificial Sequence; identical to SEQ ID NO: 2672
  source: /note="Description of Artificial Sequence: Synthetic oligonucleotide"

SEQ ID NO: 2687 - DNA, 77 bp, Artificial Sequence; identical to SEQ ID NO: 2652
  source: /note="Description of Artificial Sequence: Synthetic oligonucleotide"

SEQ ID NO: 2688 - DNA, 77 bp, Artificial Sequence; identical to SEQ ID NO: 2654
  source: /note="Description of Artificial Sequence: Synthetic oligonucleotide"

SEQ ID NO: 2689 - DNA, 79 bp, Artificial Sequence; identical to SEQ ID NO: 2655
  source: /note="Description of Artificial Sequence: Synthetic oligonucleotide"

SEQ ID NO: 2690 - DNA, 80 bp, Artificial Sequence; identical to SEQ ID NO: 2653
  source: /note="Description of Artificial Sequence: Synthetic oligonucleotide"

SEQ ID NO: 2691 - DNA, 78 bp, Artificial Sequence; identical to SEQ ID NO: 2660
  source: /note="Description of Artificial Sequence: Synthetic oligonucleotide"

SEQ ID NO: 2692 - DNA, 78 bp, Artificial Sequence; identical to SEQ ID NO: 2657
  source: /note="Description of Artificial Sequence: Synthetic oligonucleotide"

SEQ ID NO: 2693 - DNA, 76 bp, Artificial Sequence; identical to SEQ ID NO: 2685
  source: /note="Description of Artificial Sequence: Synthetic oligonucleotide"

SEQ ID NO: 2694 - DNA, 79 bp, Artificial Sequence
  source: /note="Description of Artificial Sequence: Synthetic oligonucleotide"
gtctagtgcaagctaacagttgcttttatcacaggctccaggagggtttggcctctgattagggtgggggcgtgggtgg

SEQ ID NO: 2695 - DNA, 76 bp, Artificial Sequence
  source: /note="Description of Artificial Sequence: Synthetic oligonucleotide"
gtctagtgcaagctaacagttgcttttatcacaggctccagggtttggcctctgattagggtgggggcgtgggtgg

SEQ ID NO: 2696 - DNA, 81 bp, Artificial Sequence
  source: /note="Description of Artificial Sequence: Synthetic oligonucleotide"
gtctagtgcaagctaacagttgcttttatcacaggctccaggaaagggtttggcctctgattagggtgggggcgtgggtgg

SEQ ID NO: 2697 - DNA, 75 bp, Artificial Sequence
  source: /note="Description of Artificial Sequence: Synthetic oligonucleotide"
gtctagtgcaagctaacagttgcttttatcacaggctccaggtttggcctctgattagggtgggggcgtgggtgg

SEQ ID NO: 2698 - DNA, 44 bp, Artificial Sequence
  source: /note="Description of Artificial Sequence: Synthetic oligonucleotide"
gtctagtgcaagctaacagttgcttttatcacaggcgtgggtgg

SEQ ID NO: 2699 - DNA, 52 bp, Artificial Sequence
  source: /note="Description of Artificial Sequence: Synthetic oligonucleotide"
gtctagtgcaagctaacaacatcacaggctccaggatagggggcgtgggtgg

SEQ ID NO: 2700 - DNA, 78 bp, Artificial Sequence
  source: /note="Description of Artificial Sequence: Synthetic oligonucleotide"
gtctagtgcaagctaacagttgcttttatcacaggctccaggaggtttggcctctgattagggtgggggcgtgggtgg

SEQ ID NO: 2701 - DNA, 57 bp, Artificial Sequence
  source: /note="Description of Artificial Sequence: Synthetic oligonucleotide"
gtctagtgcaagctaacagttgcttttatcacaggctccaggtgggggcgtgggtgg

SEQ ID NO: 2702 - DNA, 76 bp, Artificial Sequence; identical to SEQ ID NO: 2695
  source: /note="Description of Artificial Sequence: Synthetic oligonucleotide"

SEQ ID NO: 2703 - DNA, 75 bp, Artificial Sequence; identical to SEQ ID NO: 2697
  source: /note="Description of Artificial Sequence: Synthetic oligonucleotide"

SEQ ID NO: 2704 - DNA, 79 bp, Artificial Sequence; identical to SEQ ID NO: 2694
  source: /note="Description of Artificial Sequence: Synthetic oligonucleotide"

SEQ ID NO: 2705 - DNA, 81 bp, Artificial Sequence; identical to SEQ ID NO: 2696
  source: /note="Description of Artificial Sequence: Synthetic oligonucleotide"

SEQ ID NO: 2706 - DNA, 70 bp, Artificial Sequence
  source: /note="Description of Artificial Sequence: Synthetic oligonucleotide"
gtctagtgcaagctaacagttgcttttatcacaggctccaggcctctgattagggtgggggcgtgggtgg

SEQ ID NO: 2707 - DNA, 79 bp, Artificial Sequence; identical to SEQ ID NO: 2694
  source: /note="Description of Artificial Sequence: Synthetic oligonucleotide"

SEQ ID NO: 2708 - DNA, 75 bp, Artificial Sequence; identical to SEQ ID NO: 2697
  source: /note="Description of Artificial Sequence: Synthetic oligonucleotide"

SEQ ID NO: 2709 - DNA, 76 bp, Artificial Sequence; identical to SEQ ID NO: 2695
  source: /note="Description of Artificial Sequence: Synthetic oligonucleotide"

SEQ ID NO: 2710 - DNA, 81 bp, Artificial Sequence; identical to SEQ ID NO: 2696
  source: /note="Description of Artificial Sequence: Synthetic oligonucleotide"

SEQ ID NO: 2711 - DNA, 53 bp, Artificial Sequence
  source: /note="Description of Artificial Sequence: Synthetic oligonucleotide"
gtctagtgcaagctaacagttgcttttatcacaggctccaggggcgtgggtgg

SEQ ID NO: 2712 - DNA, 50 bp, Artificial Sequence
  source: /note="Description of Artificial Sequence: Synthetic oligonucleotide"
gtctagtgcaagctaacagttgcttttatcacaggctccagcgtgggtgg

SEQ ID NO: 2713 - DNA, 63 bp, Artificial Sequence
  source: /note="Description of Artificial Sequence: Synthetic oligonucleotide"
gtctagtgcaagctaacagttgcttttatcacaggcctctgattagggtgggggcgtgggtgg

SEQ ID NO: 2714 - DNA, 75 bp, Artificial Sequence; identical to SEQ ID NO: 2697
  source: /note="Description of Artificial Sequence: Synthetic oligonucleotide"

SEQ ID NO: 2715 - DNA, 76 bp, Artificial Sequence; identical to SEQ ID NO: 2695
  source: /note="Description of Artificial Sequence: Synthetic oligonucleotide"

SEQ ID NO: 2716 - DNA, 79 bp, Artificial Sequence; identical to SEQ ID NO: 2694
  source: /note="Description of Artificial Sequence: Synthetic oligonucleotide"

SEQ ID NO: 2717 - DNA, 81 bp, Artificial Sequence; identical to SEQ ID NO: 2696
  source: /note="Description of Artificial Sequence: Synthetic oligonucleotide"

SEQ ID NO: 2718 - DNA, 82 bp, Artificial Sequence
  source: /note="Description of Artificial Sequence: Synthetic oligonucleotide"
gtctagtgcaagctaacagttgcttttatcacaggctccaggaagagggtttggcctctgattagggtgggggcgtgggtgg

SEQ ID NO: 2719 - DNA, 64 bp, Artificial Sequence
  source: /note="Description of Artificial Sequence: Synthetic oligonucleotide"
gtctagtgcaagctaacagttgcttttatcacaggctccaggattagggtgggggcgtgggtgg

SEQ ID NO: 2720 - DNA, 78 bp, Artificial Sequence; identical to SEQ ID NO: 2700
  source: /note="Description of Artificial Sequence: Synthetic oligonucleotide"

SEQ ID NO: 2721 - DNA, 79 bp, Artificial Sequence
  source: /note="Description of Artificial Sequence: Synthetic oligonucleotide"
tatcacaggctccaggaagggtttggcctctgattaggtgggggcgtgggtggggtagaagaggactggcagacctctc

SEQ ID NO: 2722 - DNA, 64 bp, Artificial Sequence
  source: /note="Description of Artificial Sequence: Synthetic oligonucleotide"
tatcacaggctccaggaagggtttgggggcgtgggtggggtagaagaggactggcagacctctc

SEQ ID NO: 2723 - DNA, 61 bp, Artificial Sequence
  source: /note="Description of Artificial Sequence: Synthetic oligonucleotide"
tatcacaggctccaggaagggtttggcgtgggtggggtagaagaggactggcagacctctc

SEQ ID NO: 2724 - DNA, 78 bp, Artificial Sequence
  source: /note="Description of Artificial Sequence: Synthetic oligonucleotide"
tatcacaggctccaggaagggtttggcctctgattggtgggggcgtgggtggggtagaagaggactggcagacctctc

SEQ ID NO: 2725 - DNA, 57 bp, Artificial Sequence
  source: /note="Description of Artificial Sequence: Synthetic oligonucleotide"
tatcacaggctccaggaaggggcgtgggtggggtagaagaggactggcagacctctc

SEQ ID NO: 2726 - DNA, 74 bp, Artificial Sequence
  source: /note="Description of Artificial Sequence: Synthetic oligonucleotide"
tatcacaggctccaggaagggtttggcctctggtgggggcgtgggtggggtagaagaggactggcagacctctc

SEQ ID NO: 2727 - DNA, 71 bp, Artificial Sequence
  source: /note="Description of Artificial Sequence: Synthetic oligonucleotide"
tatcacaggctccaggaagggtttggcctctgggggcgtgggtggggtagaagaggactggcagacctctc

SEQ ID NO: 2728 - DNA, 79 bp, Artificial Sequence; identical to SEQ ID NO: 2721
  source: /note="Description of Artificial Sequence: Synthetic oligonucleotide"

SEQ ID NO: 2729 - DNA, 67 bp, Artificial Sequence
  source: /note="Description of Artificial Sequence: Synthetic oligonucleotide"
tatcacaggctccaggaagggtttggtgggggcgtgggtggggtagaagaggactggcagacctctc

SEQ ID NO: 2730 - DNA, 78 bp, Artificial Sequence; identical to SEQ ID NO: 2724
  source: /note="Description of Artificial Sequence: Synthetic oligonucleotide"

SEQ ID NO: 2731 - DNA, 61 bp, Artificial Sequence; identical to SEQ ID NO: 2723
  source: /note="Description of Artificial Sequence: Synthetic oligonucleotide"

SEQ ID NO: 2732 - DNA, 64 bp, Artificial Sequence; identical to SEQ ID NO: 2722
  source: /note="Description of Artificial Sequence: Synthetic oligonucleotide"

SEQ ID NO: 2733 - DNA, 81 bp, Artificial Sequence
  source: /note="Description of Artificial Sequence: Synthetic oligonucleotide"
tatcacaggctccaggaagggtttggcctctgattagaggtgggggcgtgggtggggtagaagaggactggcagacctctc

SEQ ID NO: 2734 - DNA, 78 bp, Artificial Sequence
  source: /note="Description of Artificial Sequence: Synthetic oligonucleotide"
tatcacaggctccaggaagggtttggcctctgattagtgggggcgtgggtggggtagaagaggactggcagacctctc

SEQ ID NO: 2735 - DNA, 78 bp, Artificial Sequence; identical to SEQ ID NO: 2734
  source: /note="Description of Artificial Sequence: Synthetic oligonucleotide"

SEQ ID NO: 2736 - DNA, 79 bp, Artificial Sequence; identical to SEQ ID NO: 2721
  source: /note="Description of Artificial Sequence: Synthetic oligonucleotide"

SEQ ID NO: 2737 - DNA, 51 bp, Artificial Sequence
  source: /note="Description of Artificial Sequence: Synthetic oligonucleotide"
tatcacaggctccaggaagggtttggcctctgaaggactggcagacctctc

SEQ ID NO: 2738 - DNA, 81 bp, Artificial Sequence; identical to SEQ ID NO: 2733
  source: /note="Description of Artificial Sequence: Synthetic oligonucleotide"

SEQ ID NO: 2739 - DNA, 64 bp, Artificial Sequence; identical to SEQ ID NO: 2722
  source: /note="Description of Artificial Sequence: Synthetic oligonucleotide"

SEQ ID NO: 2740 - DNA, 71 bp, Artificial Sequence; identical to SEQ ID NO: 2727
  source: /note="Description of Artificial Sequence: Synthetic oligonucleotide"

SEQ ID NO: 2741 - DNA, 74 bp, Artificial Sequence
  source: /note="Description of Artificial Sequence: Synthetic oligonucleotide"
tatcacaggctccaggaagggtttggcctctgattagggcgtgggtggggtagaagaggactggcagacctctc

SEQ ID NO: 2742 - DNA, 67 bp, Artificial Sequence; identical to SEQ ID NO: 2729
  source: /note="Description of Artificial Sequence: Synthetic oligonucleotide"

SEQ ID NO: 2743 - DNA, 79 bp, Artificial Sequence; identical to SEQ ID NO: 2721
  source: /note="Description of Artificial Sequence: Synthetic oligonucleotide"

SEQ ID NO: 2744 - DNA, 78 bp, Artificial Sequence; identical to SEQ ID NO: 2724
  source: /note="Description of Artificial Sequence: Synthetic oligonucleotide"

SEQ ID NO: 2745 - DNA, 71 bp, Artificial Sequence; identical to SEQ ID NO: 2727
  source: /note="Description of Artificial Sequence: Synthetic oligonucleotide"

SEQ ID NO: 2746 - DNA, 64 bp, Artificial Sequence; identical to SEQ ID NO: 2722
  source: /note="Description of Artificial Sequence: Synthetic oligonucleotide"

SEQ ID NO: 2747 - DNA, 61 bp, Artificial Sequence; identical to SEQ ID NO: 2723
  source: /note="Description of Artificial Sequence: Synthetic oligonucleotide"

SEQ ID NO: 2748 - DNA, 58 bp, Artificial Sequence
  source: /note="Description of Artificial Sequence: Synthetic oligonucleotide"
tatcacaggctccaggaagggggcgtgggtggggtagaagaggactggcagacctctc

SEQ ID NO: 2749 - DNA, 67 bp, Artificial Sequence; identical to SEQ ID NO: 2729
  source: /note="Description of Artificial Sequence: Synthetic oligonucleotide"

SEQ ID NO: 2750 - DNA, 78 bp, Artificial Sequence; identical to SEQ ID NO: 2734
  source: /note="Description of Artificial Sequence: Synthetic oligonucleotide"

SEQ ID NO: 2751 - DNA, 70 bp, Artificial Sequence
  source: /note="Description of Artificial Sequence: Synthetic oligonucleotide"
atgtaaggaggatgagccacatggtatgggaggactctagggtcagagaaatatgggttatatccttcta

SEQ ID NO: 2752 - DNA, 79 bp, Artificial Sequence
  source: /note="Description of Artificial Sequence: Synthetic oligonucleotide"
atgtaaggaggatgagccacatggtatgggaggtatctaaggactctagggtcagagaaatatgggttatatccttcta

SEQ ID NO: 2753 - DNA, 81 bp, Artificial Sequence
  source: /note="Description of Artificial Sequence: Synthetic oligonucleotide"
atgtaaggaggatgagccacatggtatgggaggtataactaaggactctagggtcagagaaatatgggttatatccttcta

SEQ ID NO: 2754 - DNA, 67 bp, Artificial Sequence
  source: /note="Description of Artificial Sequence: Synthetic oligonucleotide"
atgtaaggaggatgagccacatggtatgggactctagggtcagagaaatatgggttatatccttcta

SEQ ID NO: 2755 - DNA, 66 bp, Artificial Sequence
  source: /note="Description of Artificial Sequence: Synthetic oligonucleotide"
atgtaaggaggatgagccacatggtaaggactctagggtcagagaaatatgggttatatccttcta

SEQ ID NO: 2756 - DNA, 75 bp, Artificial Sequence
  source: /note="Description of Artificial Sequence: Synthetic oligonucleotide"
atgtaaggaggatgagccacatggtatgggaggtaaggactctagggtcagagaaatatgggttatatccttcta

SEQ ID NO: 2757 - DNA, 77 bp, Artificial Sequence
  source: /note="Description of Artificial Sequence: Synthetic oligonucleotide"
atgtaaggaggatgagccacatggtatgggaggtataaggactctagggtcagagaaatatgggttatatccttcta

SEQ ID NO: 2758 - DNA, 79 bp, Artificial Sequence
  source: /note="Description of Artificial Sequence: Synthetic oligonucleotide"
atgtaaggaggatgagccacatggtatgggaggtatataaggactctagggtcagagaaatatgggttatatccttcta

SEQ ID NO: 2759 - DNA, 71 bp, Artificial Sequence
  source: /note="Description of Artificial Sequence: Synthetic oligonucleotide"
atgtaaggaggatgagccacatggtatggtaaggactctagggtcagagaaatatgggttatatccttcta

SEQ ID NO: 2760 - DNA, 78 bp, Artificial Sequence
  source: /note="Description of Artificial Sequence: Synthetic oligonucleotide"
atgtaaggaggatgagccacatggtatgggaggtataaaggactctagggtcagagaaatatgggttatatccttcta

SEQ ID NO: 2761 - DNA, 81 bp, Artificial Sequence; identical to SEQ ID NO: 2753
  source: /note="Description of Artificial Sequence: Synthetic oligonucleotide"

SEQ ID NO: 2762 - DNA, 70 bp, Artificial Sequence; identical to SEQ ID NO: 2751
  source: /note="Description of Artificial Sequence: Synthetic oligonucleotide"

SEQ ID NO: 2763 - DNA, 67 bp, Artificial Sequence; identical to SEQ ID NO: 2754
  source: /note="Description of Artificial Sequence: Synthetic oligonucleotide"

SEQ ID NO: 2764 - DNA, 79 bp, Artificial Sequence; identical to SEQ ID NO: 2752
  source: /note="Description of Artificial Sequence: Synthetic oligonucleotide"

SEQ ID NO: 2765 - DNA, 66 bp, Artificial Sequence; identical to SEQ ID NO: 2755
  source: /note="Description of Artificial Sequence: Synthetic oligonucleotide"

SEQ ID NO: 2766 - DNA, 75 bp, Artificial Sequence; identical to SEQ ID NO: 2756
  source: /note="Description of Artificial Sequence: Synthetic oligonucleotide"

SEQ ID NO: 2767 - DNA, 77 bp, Artificial Sequence; identical to SEQ ID NO: 2757
  source: /note="Description of Artificial Sequence: Synthetic oligonucleotide"

SEQ ID NO: 2768 - DNA, 78 bp, Artificial Sequence
  source: /note="Description of Artificial Sequence: Synthetic oligonucleotide"
atgtaaggaggatgagccacatggtatgggaggtactaaggactctagggtcagagaaatatgggttatatccttcta

SEQ ID NO: 2769 - DNA, 79 bp, Artificial Sequence; identical to SEQ ID NO: 2758
  source: /note="Description of Artificial Sequence: Synthetic oligonucleotide"

SEQ ID NO: 2770 - DNA, 43 bp, Artificial Sequence
  source: /note="Description of Artificial Sequence: Synthetic oligonucleotide"
atgtaaggaggatgagccacatggtatgggttatatccttcta

SEQ ID NO: 2771 - DNA, 81 bp, Artificial Sequence; identical to SEQ ID NO: 2753
  source: /note="Description of Artificial Sequence: Synthetic oligonucleotide"

SEQ ID NO: 2772 - DNA, 70 bp, Artificial Sequence; identical to SEQ ID NO: 2751
  source: /note="Description of Artificial Sequence: Synthetic oligonucleotide"

SEQ ID NO: 2773 - DNA, 79 bp, Artificial Sequence; identical to SEQ ID NO: 2752
  source: /note="Description of Artificial Sequence: Synthetic oligonucleotide"

SEQ ID NO: 2774 - DNA, 67 bp, Artificial Sequence; identical to SEQ ID NO: 2754
  source: /note="Description of Artificial Sequence: Synthetic oligonucleotide"

SEQ ID NO: 2775 - DNA, 66 bp, Artificial Sequence; identical to SEQ ID NO: 2755
  source: /note="Description of Artificial Sequence: Synthetic oligonucleotide"

SEQ ID NO: 2776 - DNA, 75 bp, Artificial Sequence; identical to SEQ ID NO: 2756
  source: /note="Description of Artificial Sequence: Synthetic oligonucleotide"

SEQ ID NO: 2777 - DNA, 78 bp, Artificial Sequence; identical to SEQ ID NO: 2768
  source: /note="Description of Artificial Sequence: Synthetic oligonucleotide"

SEQ ID NO: 2778 - DNA, 77 bp, Artificial Sequence; identical to SEQ ID NO: 2757
  source: /note="Description of Artificial Sequence: Synthetic oligonucleotide"

SEQ ID NO: 2779 - DNA, 79 bp, Artificial Sequence; identical to SEQ ID NO: 2758
  source: /note="Description of Artificial Sequence: Synthetic oligonucleotide"

SEQ ID NO: 2780 - DNA, 46 bp, Artificial Sequence
  source: /note="Description of Artificial Sequence: Synthetic oligonucleotide"
atgtaaggaggatgagccacatggtatgggaggttatatccttcta

SEQ ID NO: 2781 - DNA, 70 bp, Artificial Sequence; identical to SEQ ID NO: 2751
  source: /note="Description of Artificial Sequence: Synthetic oligonucleotide"

SEQ ID NO: 2782 - DNA, 79 bp, Artificial Sequence; identical to SEQ ID NO: 2752
  source: /note="Description of Artificial Sequence: Synthetic oligonucleotide"

SEQ ID NO: 2783 - DNA, 81 bp, Artificial Sequence; identical to SEQ ID NO: 2753
  source: /note="Description of Artificial Sequence: Synthetic oligonucleotide"

SEQ ID NO: 2784 - DNA, 67 bp, Artificial Sequence; identical to SEQ ID NO: 2754
  source: /note="Description of Artificial Sequence: Synthetic oligonucleotide"

SEQ ID NO: 2785 - DNA, 66 bp, Artificial Sequence; identical to SEQ ID NO: 2755
  source: /note="Description of Artificial Sequence: Synthetic oligonucleotide"

SEQ ID NO: 2786 - DNA, 75 bp, Artificial Sequence; identical to SEQ ID NO: 2756
  source: /note="Description of Artificial Sequence: Synthetic oligonucleotide"

SEQ ID NO: 2787 - DNA, 77 bp, Artificial Sequence; identical to SEQ ID NO: 2757
  source: /note="Description of Artificial Sequence: Synthetic oligonucleotide"

SEQ ID NO: 2788 - DNA, 78 bp, Artificial Sequence; identical to SEQ ID NO: 2768
  source: /note="Description of Artificial Sequence: Synthetic oligonucleotide"

SEQ ID NO: 2789 - DNA, 66 bp, Artificial Sequence
  source: /note="Description of Artificial Sequence: Synthetic oligonucleotide"
atgtaaggaggatgagccacatggtatggactctagggtcagagaaatatgggttatatccttcta

SEQ ID NO: 2790 - DNA, 79 bp, Artificial Sequence; identical to SEQ ID NO: 2758
  source: /note="Description of Artificial Sequence: Synthetic oligonucleotide"

SEQ ID NO: 2791 - DNA, 79 bp, Artificial Sequence; identical to SEQ ID NO: 2752
  source: /note="Description of Artificial Sequence: Synthetic oligonucleotide"

SEQ ID NO: 2792 - DNA, 81 bp, Artificial Sequence; identical to SEQ ID NO: 2753
  source: /note="Description of Artificial Sequence: Synthetic oligonucleotide"

SEQ ID NO: 2793 - DNA, 70 bp, Artificial Sequence; identical to SEQ ID NO: 2751
  source: /note="Description of Artificial Sequence: Synthetic oligonucleotide"

SEQ ID NO: 2794 - DNA, 67 bp, Artificial Sequence; identical to SEQ ID NO: 2754
  source: /note="Description of Artificial Sequence: Synthetic oligonucleotide"

SEQ ID NO: 2795 - DNA, 66 bp, Artificial Sequence; identical to SEQ ID NO: 2755
  source: /note="Description of Artificial Sequence: Synthetic oligonucleotide"

SEQ ID NO: 2796 - DNA, 77 bp, Artificial Sequence; identical to SEQ ID NO: 2757
  source: /note="Description of Artificial Sequence: Synthetic oligonucleotide"

SEQ ID NO: 2797 - DNA, 78 bp, Artificial Sequence; identical to SEQ ID NO: 2768
  source: /note="Description of Artificial Sequence: Synthetic oligonucleotide"

SEQ ID NO: 2798 - DNA, 79 bp, Artificial Sequence; identical to SEQ ID NO: 2758
  source: /note="Description of Artificial Sequence: Synthetic oligonucleotide"

SEQ ID NO: 2799 - DNA, 75 bp, Artificial Sequence; identical to SEQ ID NO: 2756
  source: /note="Description of Artificial Sequence: Synthetic oligonucleotide"

SEQ ID NO: 2800 - DNA, 68 bp, Artificial Sequence
  source: /note="Description of Artificial Sequence: Synthetic oligonucleotide"
atgtaaggaggatgagccacatggtataaggactctagggtcagagaaatatgggttatatccttcta

SEQ ID NO: 2801 - DNA, 70 bp, Artificial Sequence; identical to SEQ ID NO: 2751
  source: /note="Description of Artificial Sequence: Synthetic oligonucleotide"

SEQ ID NO: 2802 - DNA, 79 bp, Artificial Sequence; identical to SEQ ID NO: 2752
  source: /note="Description of Artificial Sequence: Synthetic oligonucleotide"

SEQ ID NO: 2803 - DNA, 81 bp, Artificial Sequence; identical to SEQ ID NO: 2753
  source: /note="Description of Artificial Sequence: Synthetic oligonucleotide"

SEQ ID NO: 2804 - DNA, 67 bp, Artificial Sequence; identical to SEQ ID NO: 2754
  source: /note="Description of Artificial Sequence: Synthetic oligonucleotide"

SEQ ID NO: 2805 - DNA, 66 bp, Artificial Sequence; identical to SEQ ID NO: 2755
  source: /note="Description of Artificial Sequence: Synthetic oligonucleotide"

SEQ ID NO: 2806 - DNA, 75 bp, Artificial Sequence; identical to SEQ ID NO: 2756
  source: /note="Description of Artificial Sequence: Synthetic oligonucleotide"

SEQ ID NO: 2807 - DNA, 77 bp, Artificial Sequence; identical to SEQ ID NO: 2757
  source: /note="Description of Artificial Sequence: Synthetic oligonucleotide"

SEQ ID NO: 2808 - DNA, 78 bp, Artificial Sequence; identical to SEQ ID NO: 2768
  source: /note="Description of Artificial Sequence: Synthetic oligonucleotide"

SEQ ID NO: 2809 - DNA, 79 bp, Artificial Sequence; identical to SEQ ID NO: 2758
  source: /note="Description of Artificial Sequence: Synthetic oligonucleotide"

SEQ ID NO: 2810 - DNA, 66 bp, Artificial Sequence; identical to SEQ ID NO: 2789
  source: /note="Description of Artificial Sequence: Synthetic oligonucleotide"

SEQ ID NO: 2811 - RNA, 20 nt, Artificial Sequence
  source: /note="Description of Artificial Sequence: Synthetic oligonucleotide"
ggccacggagcgagacaucu

SEQ ID NO: 2812 - DNA, 21 bp, Artificial Sequence
  source: /note="Description of Artificial Sequence: Synthetic primer"
cagacagcaaactcacccagt

SEQ ID NO: 2813 - DNA, 20 bp, Artificial Sequence
  source: /note="Description of Artificial Sequence: Synthetic primer"
ctgacgcttatcgacgccct

SEQ ID NO: 2814 - DNA, 25 bp, Artificial Sequence
  source: /note="Description of Artificial Sequence: Synthetic primer"
agctccaaactctcaaaccacaggg

SEQ ID NO: 2815 - DNA, 25 bp, Artificial Sequence
  source: /note="Description of Artificial Sequence: Synthetic primer"
tacaattttgggagtccacacggca

SEQ ID NO: 2816 - DNA, 25 bp, Artificial Sequence
  source: /note="Description of Artificial Sequence: Synthetic primer"
agctccaaactctcaaaccacaggg

SEQ ID NO: 2817 - DNA, 25 bp, Artificial Sequence
  source: /note="Description of Artificial Sequence: Synthetic primer"
tacaattttgggagtccacacggca

SEQ ID NO: 2818 - RNA, 42 nt, Artificial Sequence; identical to SEQ ID NO: 2010
  source: /note="Description of Artificial Sequence: Synthetic oligonucleotide"
  modified_base (1)..(20): a, c, u, g, unknown or other

SEQ ID NO: 2819 - DNA, 33 bp, Artificial Sequence
  source: /note="Description of Artificial Sequence: Synthetic primer"
tcgtcggcagcgtcagatgtgtataagagacag

SEQ ID NO: 2820 - DNA, 34 bp, Artificial Sequence
  source: /note="Description of Artificial Sequence: Synthetic primer"
gtctcgtgggctcggagatgtgtataagagacag

SEQ ID NO: 2821 - DNA, 51 bp, Artificial Sequence
  source: /note="Description of Artificial Sequence: Synthetic primer"
  modified_base (30)..(37): a, c, t, g, unknown or other
aatgatacggcgaccaccgagatctacacnnnnnnnntcgtcggcagcgtc

SEQ ID NO: 2822 - DNA, 47 bp, Artificial Sequence
  source: /note="Description of Artificial Sequence: Synthetic primer"
  modified_base (25)..(32): a, c, t, g, unknown or other
caagcagaagacggcatacgagatnnnnnnnngtctcgtgggctcgg

SEQ ID NO: 2823 - DNA, 21 bp, Artificial Sequence
  source: /note="Description of Artificial Sequence: Synthetic primer"
caagcagaagacggcatacga

SEQ ID NO: 2824 - DNA, 22 bp, Artificial Sequence
  source: /note="Description of Artificial Sequence: Synthetic primer"
aatgatacggcgaccaccgaga

SEQ ID NO: 2825 - DNA, 23 bp, Artificial Sequence
  source: /note="Description of Artificial Sequence: Synthetic oligonucleotide"
ctcacctccaccctaatcagagg

SEQ ID NO: 2826 - DNA, 23 bp, Artificial Sequence
  source: /note="Description of Artificial Sequence: Synthetic oligonucleotide"
cacgcccacaccttaatcagggg

SEQ ID NO: 2827 - DNA, 23 bp, Artificial Sequence
  source: /note="Description of Artificial Sequence: Synthetic oligonucleotide"
cacgacccaaccctaatcagagg

SEQ ID NO: 2828 - DNA, 23 bp, Artificial Sequence
  source: /note="Description of Artificial Sequence: Synthetic oligonucleotide"
ctagcccctaccctaataagtgg

SEQ ID NO: 2829 - DNA, 23 bp, Artificial Sequence
  source: /note="Description of Artificial Sequence: Synthetic oligonucleotide"
tttataacaggctccagaaatgg

SEQ ID NO: 2830 - DNA, 23 bp, Artificial Sequence
  source: /note="Description of Artificial Sequence: Synthetic oligonucleotide"
catatcacaggccccaggagggg

SEQ ID NO: 2831 - DNA, 23 bp, Artificial Sequence
  source: /note="Description of Artificial Sequence: Synthetic oligonucleotide"
tggggtggggagatatgaagagg

SEQ ID NO: 2832 - DNA, 23 bp, Artificial Sequence
  source: /note="Description of Artificial Sequence: Synthetic oligonucleotide"
ggaggtggggagagatgtagagg

SEQ ID NO: 2833 - DNA, 23 bp, Artificial Sequence
  source: /note="Description of Artificial Sequence: Synthetic oligonucleotide"
catgcggaaagagatgcggttgg

SEQ ID NO: 2834 - DNA, 23 bp, Artificial Sequence
  source: /note="Description of Artificial Sequence: Synthetic oligonucleotide"
aggtacctcaaactcagcatagg

SEQ ID NO: 2835 - DNA, 23 bp, Artificial Sequence
  source: /note="Description of Artificial Sequence: Synthetic oligonucleotide"
agagaccccagactcagcatagg

SEQ ID NO: 2836 - DNA, 23 bp, Artificial Sequence
  source: /note="Description of Artificial Sequence: Synthetic oligonucleotide"
atggtatgagaaatatactatgg

SEQ ID NO: 2837 - RNA, 42 nt, Artificial Sequence; identical to SEQ ID NO: 2010
  source: /note="Description of Artificial Sequence: Synthetic oligonucleotide"
  modified_base (1)..(20): a, c, u, g, unknown or other

SEQ ID NO: 2838 - RNA, 100 nt, Artificial Sequence; identical to SEQ ID NO: 2013
  source: /note="Description of Artificial Sequence: Synthetic polynucleotide"
  modified_base (1)..(20): a, c, u, g, unknown or other

SEQ ID NO: 2839 - RNA, 42 nt, Artificial Sequence; identical to SEQ ID NO: 2010
  source: /note="Description of Artificial Sequence: Synthetic oligonucleotide"
  modified_base (1)..(20): a, c, u, g, unknown or other

SEQ ID NO: 2840 - RNA, 100 nt, Artificial Sequence; identical to SEQ ID NO: 2013
  source: /note="Description of Artificial Sequence: Synthetic polynucleotide"
  modified_base (1)..(20): a, c, u, g, unknown or other

SEQ ID NO: 2841 - DNA, 93 bp, Artificial Sequence
  source: /note="Description of Artificial Sequence: Synthetic oligonucleotide"
ctgtccacccatccatcacatataggcacctatcaggtaccagctactgtgttaggatctgtgttcccaactgacttgcctccccctgacgtc

SEQ ID NO: 2842 - DNA, 56 bp, Artificial Sequence
  source: /note="Description of Artificial Sequence: Synthetic oligonucleotide"
cacccatccatcacatataggcacctatcaggtaccagctactgtgttaggatctg

SEQ ID NO: 2843 - DNA, 57 bp, Artificial Sequence
  source: /note="Description of Artificial Sequence: Synthetic oligonucleotide"
cacccatccatcacatataggcaccttatcaggtaccagctactgtgttaggatctg

SEQ ID NO: 2844 - DNA, 45 bp, Artificial Sequence
  source: /note="Description of Artificial Sequence: Synthetic oligonucleotide"
cacccatccatcacatataggcaccagctactgtgttaggatctg

SEQ ID NO: 2845 - DNA, 55 bp, Artificial Sequence
  source: /note="Description of Artificial Sequence: Synthetic oligonucleotide"
cacccatccatcacatataggcaccatcaggtaccagctactgtgttaggatctg

SEQ ID NO: 2846 - DNA, 57 bp, Artificial Sequence; identical to SEQ ID NO: 2843
  source: /note="Description of Artificial Sequence: Synthetic oligonucleotide"

SEQ ID NO: 2847 - DNA, 45 bp, Artificial Sequence; identical to SEQ ID NO: 2844
  source: /note="Description of Artificial Sequence: Synthetic oligonucleotide"

SEQ ID NO: 2848 - DNA, 45 bp, Artificial Sequence
  source: /note="Description of Artificial Sequence: Synthetic oligonucleotide"
cacccatccatcacatataggtaccagctactgtgttaggatctg

SEQ ID NO: 2849 - DNA, 57 bp, Artificial Sequence; identical to SEQ ID NO: 2843
  source: /note="Description of Artificial Sequence: Synthetic oligonucleotide"

SEQ ID NO: 2850 - DNA, 45 bp, Artificial Sequence; identical to SEQ ID NO: 2844
  source: /note="Description of Artificial Sequence: Synthetic oligonucleotide"

SEQ ID NO: 2851 - DNA, 45 bp, Artificial Sequence; identical to SEQ ID NO: 2848
  source: /note="Description of Artificial Sequence: Synthetic oligonucleotide"

SEQ ID NO: 2852 - DNA, 57 bp, Artificial Sequence; identical to SEQ ID NO: 2843
  source: /note="Description of Artificial Sequence: Synthetic oligonucleotide"

SEQ ID NO: 2853 - DNA, 45 bp, Artificial Sequence; identical to SEQ ID NO: 2844
  source: /note="Description of Artificial Sequence: Synthetic oligonucleotide"

SEQ ID NO: 2854 - DNA, 45 bp, Artificial Sequence; identical to SEQ ID NO: 2848
  source: /note="Description of Artificial Sequence: Synthetic oligonucleotide"

SEQ ID NO: 2855 - DNA, 56 bp, Artificial Sequence; identical to SEQ ID NO: 2842
  source: /note="Description of Artificial Sequence: Synthetic oligonucleotide"

SEQ ID NO: 2856 - DNA, 57 bp, Artificial Sequence
  source: /note="Description of Artificial Sequence: Synthetic oligonucleotide"
cacccatccatcacatataggcacctatcaaggtaccagctactgtgttaggatctg

SEQ ID NO: 2857 - DNA, 45 bp, Artificial Sequence; identical to SEQ ID NO: 2848
  source: /note="Description of Artificial Sequence: Synthetic oligonucleotide"

SEQ ID NO: 2858 - DNA, 55 bp, Artificial Sequence
  source: /note="Description of Artificial Sequence: Synthetic oligonucleotide"
cacccatccatcacatataggcacctatcggtaccagctactgtgttaggatctg

SEQ ID NO: 2859 - DNA, 57 bp, Artificial Sequence; identical to SEQ ID NO: 2856
  source: /note="Description of Artificial Sequence: Synthetic oligonucleotide"

SEQ ID NO: 2860 - DNA, 45 bp, Artificial Sequence; identical to SEQ ID NO: 2844
  source: /note="Description of Artificial Sequence: Synthetic oligonucleotide"

SEQ ID NO: 2861 - DNA, 55 bp, Artificial Sequence; identical to SEQ ID NO: 2858
  source: /note="Description of Artificial Sequence: Synthetic oligonucleotide"

SEQ ID NO: 2862 - DNA, 57 bp, Artificial Sequence; identical to SEQ ID NO: 2856
  source: /note="Description of Artificial Sequence: Synthetic oligonucleotide"

SEQ ID NO: 2863 - DNA, 55 bp, Artificial Sequence; identical to SEQ ID NO: 2858
  source: /note="Description of Artificial Sequence: Synthetic oligonucleotide"

SEQ ID NO: 2864 - DNA, 45 bp, Artificial Sequence; identical to SEQ ID NO: 2844
  source: /note="Description of Artificial Sequence: Synthetic oligonucleotide"

SEQ ID NO: 2865 - DNA, 57 bp, Artificial Sequence; identical to SEQ ID NO: 2856
  source: /note="Description of Artificial Sequence: Synthetic oligonucleotide"

SEQ ID NO: 2866 - DNA, 45 bp, Artificial Sequence; identical to SEQ ID NO: 2844
  source: /note="Description of Artificial Sequence: Synthetic oligonucleotide"

SEQ ID NO: 2867 - DNA, 55 bp, Artificial Sequence; identical to SEQ ID NO: 2858
  source: /note="Description of Artificial Sequence: Synthetic oligonucleotide"

SEQ ID NO: 2868 - DNA, 60 bp, Artificial Sequence
  source: /note="Description of Artificial Sequence: Synthetic oligonucleotide"
ggcacctatcaggtaccagctactgtgttaggatctgtgttcccaactgacttgcctccc

SEQ ID NO: 2869 - DNA, 61 bp, Artificial Sequence
  source: /note="Description of Artificial Sequence: Synthetic oligonucleotide"
ggcacctatcaggtaccagctactgttgttaggatctgtgttcccaactgacttgcctccc

SEQ ID NO: 2870 - DNA, 58 bp, Artificial Sequence
  source: /note="Description of Artificial Sequence: Synthetic oligonucleotide"
ggcacctatcaggtaccagctactgttaggatctgtgttcccaactgacttgcctccc

SEQ ID NO: 2871 - DNA, 48 bp, Artificial Sequence
  source: /note="Description of Artificial Sequence: Synthetic oligonucleotide"
ggcacctatcaggtaccagctactgtgttcccaactgacttgcctccc

SEQ ID NO: 2872 - DNA, 61 bp, Artificial Sequence; identical to SEQ ID NO: 2869
  source: /note="Description of Artificial Sequence: Synthetic oligonucleotide"

SEQ ID NO: 2873 - DNA, 58 bp, Artificial Sequence; identical to SEQ ID NO: 2870
  source: /note="Description of Artificial Sequence: Synthetic oligonucleotide"

SEQ ID NO: 2874 - DNA, 48 bp, Artificial Sequence; identical to SEQ ID NO: 2871
  source: /note="Description of Artificial Sequence: Synthetic oligonucleotide"

SEQ ID NO: 2875 - DNA, 61 bp, Artificial Sequence; identical to SEQ ID NO: 2869
  source: /note="Description of Artificial Sequence: Synthetic oligonucleotide"

SEQ ID NO: 2876 - DNA, 58 bp, Artificial Sequence; identical to SEQ ID NO: 2870
  source: /note="Description of Artificial Sequence: Synthetic oligonucleotide"

SEQ ID NO: 2877 - DNA, 48 bp, Artificial Sequence; identical to SEQ ID NO: 2871
  source: /note="Description of Artificial Sequence: Synthetic oligonucleotide"

SEQ ID NO: 2878 - DNA, 61 bp, Artificial Sequence; identical to SEQ ID NO: 2869
  source: /note="Description of Artificial Sequence: Synthetic oligonucleotide"

SEQ ID NO: 2879 - DNA, 58 bp, Artificial Sequence; identical to SEQ ID NO: 2870
  source: /note="Description of Artificial Sequence: Synthetic oligonucleotide"

SEQ ID NO: 2880 - DNA, 48 bp, Artificial Sequence; identical to SEQ ID NO: 2871
  source: /note="Description of Artificial Sequence: Synthetic oligonucleotide"

SEQ ID NO: 2881 - DNA, 60 bp, Artificial Sequence
  source: /note="Description of Artificial Sequence: Synthetic oligonucleotide"
ttttcatctgtcgggctgtccacccatccatcacatataggcacctatcaggtaccagct

SEQ ID NO: 2882 - DNA, 58 bp, Artificial Sequence
  source: /note="Description of Artificial Sequence: Synthetic oligonucleotide"
ttttcatctgtcgggctgtccacccatccatcatataggcacctatcaggtaccagct

SEQ ID NO: 2883 - DNA, 55 bp, Artificial Sequence
  source: /note="Description of Artificial Sequence: Synthetic oligonucleotide"
ttttcatctgtcgggctgtccacccatccatataggcacctatcaggtaccagct

SEQ ID NO: 2884 - DNA, 43 bp, Artificial Sequence
  source: /note="Description of Artificial Sequence: Synthetic oligonucleotide"
ttttcatctgtcgggctgtccacccatccatcaggtaccagct

SEQ ID NO: 2885 - DNA, 58 bp, Artificial Sequence; identical to SEQ ID NO: 2882
  source: /note="Description of Artificial Sequence: Synthetic oligonucleotide"

SEQ ID NO: 2886 - DNA, 55 bp, Artificial Sequence; identical to SEQ ID NO: 2883
  source: /note="Description of Artificial Sequence: Synthetic oligonucleotide"

SEQ ID NO: 2887 - DNA, 43 bp, Artificial Sequence; identical to SEQ ID NO: 2884
  source: /note="Description of Artificial Sequence: Synthetic oligonucleotide"

SEQ ID NO: 2888 - DNA, 58 bp, Artificial Sequence; identical to SEQ ID NO: 2882
  source: /note="Description of Artificial Sequence: Synthetic oligonucleotide"

SEQ ID NO: 2889 - DNA, 43 bp, Artificial Sequence; identical to SEQ ID NO: 2884
  source: /note="Description of Artificial Sequence: Synthetic oligonucleotide"

SEQ ID NO: 2890 - DNA, 55 bp, Artificial Sequence; identical to SEQ ID NO: 2883
  source: /note="Description of Artificial Sequence: Synthetic oligonucleotide"

SEQ ID NO: 2891 - DNA, 58 bp, Artificial Sequence; identical to SEQ ID NO: 2882
  source: /note="Description of Artificial Sequence: Synthetic oligonucleotide"

SEQ ID NO: 2892 - DNA, 55 bp, Artificial Sequence; identical to SEQ ID NO: 2883
  source: /note="Description of Artificial Sequence: Synthetic oligonucleotide"

SEQ ID NO: 2893 - DNA, 43 bp, Artificial Sequence; identical to SEQ ID NO: 2884
  source: /note="Description of Artificial Sequence: Synthetic oligonucleotide"

SEQ ID NO: 2894 - DNA, 60 bp, Artificial Sequence
  source: /note="Description of Artificial Sequence: Synthetic oligonucleotide"
cctgtgggcagtgccagatgaacttcccattgggggacattcttatttttatcgagcaca

SEQ ID NO: 2895 - DNA, 59 bp, Artificial Sequence
  source: /note="Description of Artificial Sequence: Synthetic oligonucleotide"
cctgtgggcagtgccagatgaacttccattgggggacattcttatttttatcgagcaca

SEQ ID NO: 2896 - DNA, 58 bp, Artificial Sequence
  source: /note="Description of Artificial Sequence: Synthetic oligonucleotide"
cctgtgggcagtgccagatgaacttcattgggggacattcttatttttatcgagcaca

SEQ ID NO: 2897 - DNA, 61 bp, Artificial Sequence
  source: /note="Description of Artificial Sequence: Synthetic oligonucleotide"
cctgtgggcagtgccagatgaacttccccattgggggacattcttatttttatcgagcaca

SEQ ID NO: 2898 - DNA, 59 bp, Artificial Sequence; identical to SEQ ID NO: 2895
  source: /note="Description of Artificial Sequence: Synthetic oligonucleotide"

SEQ ID NO: 2899 - DNA, 58 bp, Artificial Sequence; identical to SEQ ID NO: 2896
  source: /note="Description of Artificial Sequence: Synthetic oligonucleotide"

SEQ ID NO: 2900 - DNA, 61 bp, Artificial Sequence; identical to SEQ ID NO: 2897
  source: /note="Description of Artificial Sequence: Synthetic oligonucleotide"

SEQ ID NO: 2901 - DNA, 60 bp, Artificial Sequence
  source: /note="Description of Artificial Sequence: Synthetic oligonucleotide"
ttttatcgagcacaaacggaaacaatgcaatggcagcctctgcttagaaaaagctgtgga

SEQ ID NO: 2902 - DNA, 55 bp, Artificial Sequence
  source: /note="Description of Artificial Sequence: Synthetic oligonucleotide"
ttttatcgagcacaaacggaaacaatggcagcctctgcttagaaaaagctgtgga

SEQ ID NO: 2903 - DNA, 59 bp, Artificial Sequence
  source: /note="Description of Artificial Sequence: Synthetic oligonucleotide"
ttttatcgagcacaaacggaaacaatgaatggcagcctctgcttagaaaaagctgtgga

SEQ ID NO: 2904 - DNA, 59 bp, Artificial Sequence
  source: /note="Description of Artificial Sequence: Synthetic oligonucleotide"
ttttatcgagcacaaacggaaacaatcaatggcagcctctgcttagaaaaagctgtgga

SEQ ID NO: 2905 - DNA, 55 bp, Artificial Sequence; identical to SEQ ID NO: 2902
  source: /note="Description of Artificial Sequence: Synthetic oligonucleotide"

SEQ ID NO: 2906 - DNA, 59 bp, Artificial Sequence; identical to SEQ ID NO: 2903
  source: /note="Description of Artificial Sequence: Synthetic oligonucleotide"

SEQ ID NO: 2907 - DNA, 59 bp, Artificial Sequence; identical to SEQ ID NO: 2904
  source: /note="Description of Artificial Sequence: Synthetic oligonucleotide"

SEQ ID NO: 2908 - DNA, 60 bp, Artificial Sequence
  source: /note="Description of Artificial Sequence: Synthetic oligonucleotide"
atgagtgcagaatatgccccgcagggtatttgtaagttgagccttatttcttctacgaaa

SEQ ID NO: 2909 - DNA, 45 bp, Artificial Sequence
  source: /note="Description of Artificial Sequence: Synthetic oligonucleotide"
atgagtgcagggtatttgtaagttgagccttatttcttctacaaa

SEQ ID NO: 2910 - DNA, 54 bp, Artificial Sequence
  source: /note="Description of Artificial Sequence: Synthetic oligonucleotide"
atgagtgcagaatatgcagggtatttgtaagttgagccttatttcttctacaaa

SEQ ID NO: 2911 - DNA, 59 bp, Artificial Sequence
  source: /note="Description of Artificial Sequence: Synthetic oligonucleotide"
atgagtgcagaatatgcccgcagggtatttgtaagttgagccttatttcttctacgaaa

SEQ ID NO: 2912 - DNA, 78 bp, Artificial Sequence
  source: /note="Description of Artificial Sequence: Synthetic oligonucleotide"
gggcagtgccagatgaacttcccattgggggacattcttatttttatcgagcacaaacggaaacaatgcaatggcagc

SEQ ID NO: 2913 - DNA, 80 bp, Artificial Sequence
  source: /note="Description of Artificial Sequence: Synthetic oligonucleotide"
gttttagagctagaaatagcaagttaaaataaggctagtccgttatcaacttgaaaaagtggcaccgagtcggtgctttt

SEQ ID NO: 2914 - DNA, 90 bp, Artificial Sequence
  source: /note="Description of Artificial Sequence: Synthetic oligonucleotide"
gtttaagagctatgctggaaacagcatagcaagtttaaataaggctagtccgttatcaacttgaaaaagtggcaccgagtcggtgctttt

SEQ ID NO: 2915 - DNA, 42 bp, Artificial Sequence
  source: /note="Description of Artificial Sequence: Synthetic oligonucleotide"
agtgccagatgaacttcccattgggggacattcttattttta

SEQ ID NO: 2916 - DNA, 41 bp, Artificial Sequence
  source: /note="Description of Artificial Sequence: Synthetic oligonucleotide"
agtgccagatgaacttccattgggggacattcttattttta

SEQ ID NO: 2917 - DNA, 40 bp, Artificial Sequence
  source: /note="Description of Artificial Sequence: Synthetic oligonucleotide"
agtgccagatgaacttcattgggggacattcttattttta

SEQ ID NO: 2918 - DNA, 43 bp, Artificial Sequence
  source: /note="Description of Artificial Sequence: Synthetic oligonucleotide"
agtgccagatgaacttccccattgggggacattcttattttta

SEQ ID NO: 2919 - DNA, 41 bp, Artificial Sequence; identical to SEQ ID NO: 2916
  source: /note="Description of Artificial Sequence: Synthetic oligonucleotide"

SEQ ID NO: 2920 - DNA, 40 bp, Artificial Sequence; identical to SEQ ID NO: 2917
  source: /note="Description of Artificial Sequence: Synthetic oligonucleotide"

SEQ ID NO: 2921 - DNA, 43 bp, Artificial Sequence; identical to SEQ ID NO: 2918
  source: /note="Description of Artificial Sequence: Synthetic oligonucleotide"

SEQ ID NO: 2922 - DNA, 60 bp, Artificial Sequence; identical to SEQ ID NO: 2894
  source: /note="Description of Artificial Sequence: Synthetic oligonucleotide"

SEQ ID NO: 2923 - DNA, 59 bp, Artificial Sequence; identical to SEQ ID NO: 2895
  source: /note="Description of Artificial Sequence: Synthetic oligonucleotide"

SEQ ID NO: 2924 - DNA, 58 bp, Artificial Sequence; identical to SEQ ID NO: 2896
  source: /note="Description of Artificial Sequence: Synthetic oligonucleotide"

SEQ ID NO: 2925 - DNA, 61 bp, Artificial Sequence; identical to SEQ ID NO: 2897
  source: /note="Description of Artificial Sequence: Synthetic oligonucleotide"

SEQ ID NO: 2926 - DNA, 59 bp, Artificial Sequence; identical to SEQ ID NO: 2895
  source: /note="Description of Artificial Sequence: Synthetic oligonucleotide"

SEQ ID NO: 2927 - DNA, 58 bp, Artificial Sequence; identical to SEQ ID NO: 2896
  source: /note="Description of Artificial Sequence: Synthetic oligonucleotide"

SEQ ID NO: 2928 - DNA, 61 bp, Artificial Sequence; identical to SEQ ID NO: 2897
  source: /note="Description of Artificial Sequence: Synthetic oligonucleotide"

SEQ ID NO: 2929 - DNA, 59 bp, Artificial Sequence; identical to SEQ ID NO: 2895
  source: /note="Description of Artificial Sequence: Synthetic oligonucleotide"

SEQ ID NO: 2930 - DNA, 58 bp, Artificial Sequence; identical to SEQ ID NO: 2896
  source: /note="Description of Artificial Sequence: Synthetic oligonucleotide"

SEQ ID NO: 2931 - DNA, 55 bp, Artificial Sequence
  source: /note="Description of Artificial Sequence: Synthetic oligonucleotide"
cctgtgggcagtgccagatgaacattgggggacattcttatttttatcgagcaca

SEQ ID NO: 2932 - DNA, 59 bp, Artificial Sequence; identical to SEQ ID NO: 2895
  source: /note="Description of Artificial Sequence: Synthetic oligonucleotide"

SEQ ID NO: 2933 - DNA, 58 bp, Artificial Sequence; identical to SEQ ID NO: 2896
  source: /note="Description of Artificial Sequence: Synthetic oligonucleotide"

SEQ ID NO: 2934 - DNA, 55 bp, Artificial Sequence; identical to SEQ ID NO: 2931
  source: /note="Description of Artificial Sequence: Synthetic oligonucleotide"

SEQ ID NO: 2935 - DNA, 59 bp, Artificial Sequence; identical to SEQ ID NO: 2895
  source: /note="Description of Artificial Sequence: Synthetic oligonucleotide"

SEQ ID NO: 2936 - DNA, 61 bp, Artificial Sequence; identical to SEQ ID NO: 2897
  source: /note="Description of Artificial Sequence: Synthetic oligonucleotide"

SEQ ID NO: 2937 - DNA, 58 bp, Artificial Sequence; identical to SEQ ID NO: 2896
  source: /note="Description of Artificial Sequence: Synthetic oligonucleotide"

SEQ ID NO: 2938 - DNA, 59 bp, Artificial Sequence; identical to SEQ ID NO: 2895
  source: /note="Description of Artificial Sequence: Synthetic oligonucleotide"

SEQ ID NO: 2939 - DNA, 61 bp, Artificial Sequence; identical to SEQ ID NO: 2897
  source: /note="Description of Artificial Sequence: Synthetic oligonucleotide"

SEQ ID NO: 2940 - DNA, 58 bp, Artificial Sequence
  source: /note="Description of Artificial Sequence: Synthetic oligonucleotide"
cctgtgggcagtgccagatgaacttccttgggggacattcttatttttatcgagcaca

SEQ ID NO: 2941 - DNA, 59 bp, Artificial Sequence; identical to SEQ ID NO: 2895
  source: /note="Description of Artificial Sequence: Synthetic oligonucleotide"

SEQ ID NO: 2942 - DNA, 55 bp, Artificial Sequence; identical to SEQ ID NO: 2931
  source: /note="Description of Artificial Sequence: Synthetic oligonucleotide"

SEQ ID NO: 2943 - DNA, 58 bp, Artificial Sequence; identical to SEQ ID NO: 2896
  source: /note="Description of Artificial Sequence: Synthetic oligonucleotide"

SEQ ID NO: 2944 - DNA, 59 bp, Artificial Sequence; identical to SEQ ID NO: 2895
  source: /note="Description of Artificial Sequence: Synthetic oligonucleotide"

SEQ ID NO: 2945 - DNA, 55 bp, Artificial Sequence; identical to SEQ ID NO: 2931
  source: /note="Description of Artificial Sequence: Synthetic oligonucleotide"

SEQ ID NO: 2946 - DNA, 58 bp, Artificial Sequence; identical to SEQ ID NO: 2896
  source: /note="Description of Artificial Sequence: Synthetic oligonucleotide"

SEQ ID NO: 2947 - DNA, 95 bp, Artificial Sequence
  source: /note="Description of Artificial Sequence: Synthetic oligonucleotide"
gggcagtgccagatgaacttcccattgggggacattcttatttttatcgagcacaaacggaaacaatgcaatggcagcctctgcttagaaaaagc

SEQ ID NO: 2948 - DNA, 49 bp, Artificial Sequence
  source: /note="Description of Artificial Sequence: Synthetic oligonucleotide"
gggcagtgccagatgaacttcccaatggcagcctctgcttagaaaaagc

SEQ ID NO: 2949 - DNA, 89 bp, Artificial Sequence
  source: /note="Description of Artificial Sequence: Synthetic oligonucleotide"
gggcagtgccagatgaacttcccattgggggacattcttatttttatcgagcacaaacaatgcaatggcagcctctgcttagaaaaagc

SEQ ID NO: 2950 - DNA, 49 bp, Artificial Sequence; identical to SEQ ID NO: 2948
  source: /note="Description of Artificial Sequence: Synthetic oligonucleotide"

SEQ ID NO: 2951 - DNA, 89 bp, Artificial Sequence; identical to SEQ ID NO: 2949
  source: /note="Description of Artificial Sequence: Synthetic oligonucleotide"

SEQ ID NO: 2952 - DNA, 49 bp, Artificial Sequence; identical to SEQ ID NO: 2948
  source: /note="Description of Artificial Sequence: Synthetic oligonucleotide"

SEQ ID NO: 2953 - DNA, 48 bp, Artificial Sequence
  source: /note="Description of Artificial Sequence: Synthetic oligonucleotide"
gggcagtgccagatgaacttccaatggcagcctctgcttagaaaaagc

SEQ ID NO: 2954 - DNA, 49 bp, Artificial Sequence; identical to SEQ ID NO: 2948
  source: /note="Description of Artificial Sequence: Synthetic oligonucleotide"

SEQ ID NO: 2955 - DNA, 48 bp, Artificial Sequence; identical to SEQ ID NO: 2953
  source: /note="Description of Artificial Sequence: Synthetic oligonucleotide"

SEQ ID NO: 2956 - DNA, 90 bp, Artificial Sequence
  source: /note="Description of Artificial Sequence: Synthetic oligonucleotide"
gtctagtgcaagctaacagttgcttttatcacaggctccaggaagggtttggcctctgattagggtgggggcgtgggtggggtagaagag

SEQ ID NO: 2957 - DNA, 89 bp, Artificial Sequence
  source: /note="Description of Artificial Sequence: Synthetic oligonucleotide"
gtctagtgcaagctaacagttgcttttatcacaggctccaggaagggtttggcctctgattaggtgggggcgtgggtggggtagaagag

SEQ ID NO: 2958 - DNA, 81 bp, Artificial Sequence
  source: /note="Description of Artificial Sequence: Synthetic oligonucleotide"
gtctagtgcaagctaacagttgcttttatcacaggctccaggaagggtttggcctctgggggcgtgggtggggtagaagag

SEQ ID NO: 2959 - DNA, 71 bp, Artificial Sequence
  source: /note="Description of Artificial Sequence: Synthetic oligonucleotide"
gtctagtgcaagctaacagttgcttttatcacaggctccaggaagggtttggcgtgggtggggtagaagag

SEQ ID NO: 2960 - DNA, 71 bp, Artificial Sequence; identical to SEQ ID NO: 2959
  source: /note="Description of Artificial Sequence: Synthetic oligonucleotide"

SEQ ID NO: 2961 - DNA, 89 bp, Artificial Sequence; identical to SEQ ID NO: 2957
  source: /note="Description of Artificial Sequence: Synthetic oligonucleotide"

SEQ ID NO: 2962 - DNA, 66 bp, Artificial Sequence
  source: /note="Description of Artificial Sequence: Synthetic oligonucleotide"
gtctagtgcaagctaacagttgcttttatcacaggctccaggaagggcgtgggtggggtagaagag

SEQ ID NO: 2963 - DNA, 71 bp, Artificial Sequence; identical to SEQ ID NO: 2959
  source: /note="Description of Artificial Sequence: Synthetic oligonucleotide"

SEQ ID NO: 2964 - DNA, 77 bp, Artificial Sequence
  source: /note="Description of Artificial Sequence: Synthetic oligonucleotide"
gtctagtgcaagctaacagttgcttttatcacaggctccaggaagggtttggtgggggcgtgggtggggtagaagag

SEQ ID NO: 2965 - DNA, 74 bp, Artificial Sequence
  source: /note="Description of Artificial Sequence: Synthetic oligonucleotide"
gtctagtgcaagctaacagttgcttttatcacaggctccaggaagggtttgggggcgtgggtggggtagaagag

SEQ ID NO: 2966 - DNA, 71 bp, Artificial Sequence; identical to SEQ ID NO: 2959
  source: /note="Description of Artificial Sequence: Synthetic oligonucleotide"

SEQ ID NO: 2967 - DNA, 72 bp, Artificial Sequence
  source: /note="Description of Artificial Sequence: Synthetic oligonucleotide"
gtctagtgcaagctaacagttgcttttatcacaggctccaggaagggtttgggcgtgggtggggtagaagag

SEQ ID NO: 2968 - DNA, 66 bp, Artificial Sequence
  source: /note="Description of Artificial Sequence: Synthetic oligonucleotide"
gtctagtgcaagctaacagttgcttttatcacaggctccaggaagggtttgggtggggtagaagag

SEQ ID NO: 2969 - protein, 6 aa, Artificial Sequence
  source: /note="Description of Artificial Sequence: Synthetic 6xHis tag"
HHHHHH

SEQ ID NO: 2970 - protein, 8 aa, Artificial Sequence
  source: /note="Description of Artificial Sequence: Synthetic 8xHis tag"
HHHHHHHH

SEQ ID NO: 2971 - protein, 10 aa, Artificial Sequence
  source: /note="Description of Artificial Sequence: Synthetic peptide"
  MISC_FEATURE (1)..(10): /note="This sequence may encompass 3-10 residues"
HHHHHHHHHH

SEQ ID NO: 2972-6583 - skipped (3612 entries)

SEQ ID NO: 6584 - RNA, 12 nt, Artificial Sequence
  source: /note="Description of Artificial Sequence: Synthetic oligonucleotide"
guuuuagagcua

SEQ ID NO: 6585 - RNA, 12 nt, Artificial Sequence
  source: /note="Description of Artificial Sequence: Synthetic oligonucleotide"
guuuaagagcua

SEQ ID NO: 6586 - RNA, 5 nt, Artificial Sequence
  source: /note="Description of Artificial Sequence: Synthetic oligonucleotide"
ugcug

SEQ ID NO: 6587 - RNA, 5 nt, Artificial Sequence
  source: /note="Description of Artificial Sequence: Synthetic oligonucleotide"
uuuug

SEQ ID NO: 6588 - RNA, 4 nt, Artificial Sequence
  source: /note="Description of Artificial Sequence: Synthetic oligonucleotide"
gaaa

SEQ ID NO: 6589 - RNA, 60 nt, Artificial Sequence
  source: /note="Description of Artificial Sequence: Synthetic oligonucleotide"
uagcaaguuaaaauaaggcuaguccguuaucaacuugaaaaaguggcaccgagucggugc

SEQ ID NO: 6590 - RNA, 60 nt, Artificial Sequence
  source: /note="Description of Artificial Sequence: Synthetic oligonucleotide"
uagcaaguuuaaauaaggcuaguccguuaucaacuugaaaaaguggcaccgagucggugc

SEQ ID NO: 6591 - RNA, 5 nt, Artificial Sequence
  source: /note="Description of Artificial Sequence: Synthetic oligonucleotide"
cagca

SEQ ID NO: 6592-6595 - skipped (4 entries)

SEQ ID NO: 6596 - DNA, 5000 bp, Artificial Sequence
  source: /note="Description of Artificial Sequence: Synthetic polynucleotide"
  misc_feature (1)..(5000): /note="This sequence may encompass 50-5000 nucleotides"
aaaaaaaaaaaaaaaaaaaaaaaaaaaaaaaaaaaaaaaaaaaaaaaaaaaaaaaaaaaaaaaaaaaaaaaaaaaaaaaaaaaaaaaaaaaaaaaaaaaaaaaaaaaaaaaaaaaaaaaaaaaaaaaaaaaaaaaaaaaaaaaaaaaaaaaaaaaaaaaaaaaaaaaaaaaaaaaaaaaaaaaaaaaaaaaaaaaaaaaaaaaaaaaaaaaaaaaaaaaaaaaaaaaaaaaaaaaaaaaaaaaaaaaaaaaaaaaaaaaaaaaaaaaaaaaaaaaaaaaaaaaaaaaaaaaaaaaaaaaaaaaaaaaaaaaaaaaaaaaaaaaaaaaaaaaaaaaaaaaaaaaaaaaaaaaaaaaaaaaaaaaaaaaaaaaaaaaaaaaaaaaaaaaaaaaaaaaaaaaaaaaaaaaaaaaaaaaaaaaaaaaaaaaaaaaaaaaaaaaaaaaaaaaaaaaaaaaaaaaaaaaaaaaaaaaaaaaaaaaaaaaaaaaaaaaaaaaaaaaaaaaaaaaaaaaaaaaaaaaaaaaaaaaaaaaaaaaaaaaaaaaaaaaaaaaaaaaaaaaaaaaaaaaaaaaaaaaaaaaaaaaaaaaaaaaaaaaaaaaaaaaaaaaaaaaaaaaaaaaaaaaaaaaaaaaaaaaaaaaaaaaaaaaaaaaaaaaaaaaaaaaaaaaaaaaaaaaaaaaaaaaaaaaaaaaaaaaaaaaaaaaaaaaaaaaaaaaaaaaaaaaaaaaaaaaaaaaaaaaaaaaaaaaaaaaaaaaaaaaaaaaaaaaaaaaaaaaaaaaaaaaaaaaaaaaaaaaaaaaaaaaaaaaaaaaaaaaaaaaaaaaaaaaaaaaaaaaaaaaaaaaaaaaaaaaaaaaaaaaaaaaaaaaaaaaaaaaaaaaaaaaaaaaaaaaaaaaaaaaaaaaaaaaaaaaaaaaaaaaaaaaaaaaaaaaaaaaaaaaaaaaaaaaaaaaaaaaaaaaaaaaaaaaaaaaaaaaaaaaaaaaaaaaaaaaaaaaaaaaaaaaaaaaaaaaaaaaaaaaaaaaaaaaaaaaaaaaaaaaaaaaaaaaaaaaaaaaaaaaaaaaaaaaaaaaaaaaaaaaaaaaaaaaaaaaaaaaaaaaaaaaaaaaaaaaaaaaaaaaaaaaaaaaaaaaaaaaaaaaaaaaaaaaaaaaaaaaaaaaaaaaaaaaaaaaaaaaaaaaaaaaaaaaaaaaaaaaaaaaaaaaaaaaaaaaaaaaaaaaaaaaaaaaaaaaaaaaaaaaaaaaaaaaaaaaaaaaaaaaaaaaaaaaaaaaaaaaaaaaaaaaaaaaaaaaaaaaaaaaaaaaaaaaaaaaaaaaaaaaaaaaaaaaaaaaaaaaaaaaaaaaaaaaaaaaaaaaaaaaaaaaaaaaaaaaaaaaaaaaaaaaaaaaaaaaaaaaaaaaaaaaaaaaaaaaaaaaaaaaaaaaaaaaaaaaaaaaaaaaaaaaaaaaaaaaaaaaaaaaaaaaaaaaaaaaaaaaaaaaaaaaaaaaaaaaaaaaaaaaaaaaaaaaaaaaaaaaaaaaaaaaaaaaaaaaaaaaaaaaaaaaaaaaaaaaaaaaaaaaaaaaaaaaaaaaaaaaaaaaaaaaaaaaaaaaaaaaaaaaaaaaaaaaaaaaaaaaaaaaaaaaaaaaaaaaaaaaaaaaaaaaaaaaaaaaaaaaaaaaaaaaaaaaaaaaaaaaaaaaaaaaaaaaaaaaaaaaaaaaaaaaaaaaaaaaaaaaaaaaaaaaaaaaaaaaaaaaaaaaaaaaaaaaaaaaaaaaaaaaaaaaaaaaaaaaaaaaaaaaaaaaaaaaaaaaaaaaaaaaaaaaaaaaaaaaaaaaaaaaaaaaaaaaaaaaaaaaaaaaaaaaaaaaaaaaaaaaaaaaaaaaaaaaaaaaaaaaaaaaaaaaaaaaaaaaaaaaaaaaaaaaaaaaaaaaaaaaaaaaaaaaaaaaaaaaaaaaaaaaaaaaaaaaaaaaaaaaaaaaaaaaaaaaaaaaaaaaaaaaaaaaaaaaaaaaaaaaaaaaaaaaaaaaaaaaaaaaaaaaaaaaaaaaaaaaaaaaaaaaaaaaaaaaaaaaaaaaaaaaaaaaaaaaaaaaaaaaaaaaaaaaaaaaaaaaaaaaaaaaaaaaaaaaaaaaaaaaaaaaaaaaaaaaaaaaaaaaaaaaaaaaaaaaaaaaaaaaaaaaaaaaaaaaaaaaaaaaaaaaaaaaaaaaaaaaaaaaaaaaaaaaaaaaaaaaaaaaaaaaaaaaaaaaaaaaaaaaaaaaaaaaaaaaaaaaaaaaaaaaaaaaaaaaaaaaaaaaaaaaaaaaaaaaaaaaaaaaaaaaaaaaaaaaaaaaaaaaaaaaaaaaaaaaaaaaaaaaaaaaaaaaaaaaaaaaaaaaaaaaaaaaaaaaaaaaaaaaaaaaaaaaaaaaaaaaaaaaaaaaaaaaaaaaaaaaaaaaaaaaaaaaaaaaaaaaaaaaaaaaaaaaaaaaaaaaaaaaaaaaaaaaaaaaaaaaaaaaaaaaaaaaaaaaaaaaaaaaaaaaaaaaaaaaaaaaaaaaaaaaaaaaaaaaaaaaaaaaaaaaaaaaaaaaaaaaaaaaaaaaaaaaaaaaaaaaaaaaaaaaaaaaaaaaaaaaaaaaaaaaaaaaaaaaaaaaaaaaaaaaaaaaaaaaaaaaaaaaaaaaaaaaaaaaaaaaaaaaaaaaaaaaaaaaaaaaaaaaaaaaaaaaaaaaaaaaaaaaaaaaaaaaaaaaaaaaaaaaaaaaaaaaaaaaaaaaaaaaaaaaaaaaaaaaaaaaaaaaaaaaaaaaaaaaaaaaaaaaaaaaaaaaaaaaaaaaaaaaaaaaaaaaaaaaaaaaaaaaaaaaaaaaaaaaaaaaaaaaaaaaaaaaaaaaaaaaaaaaaaaaaaaaaaaaaaaaaaaaaaaaaaaaaaaaaaaaaaaaaaaaaaaaaaaaaaaaaaaaaaaaaaaaaaaaaaaaaaaaaaaaaaaaaaaaaaaaaaaaaaaaaaaaaaaaaaaaaaaaaaaaaaaaaaaaaaaaaaaaaaaaaaaaaaaaaaaaaaaaaaaaaaaaaaaaaaaaaaaaaaaaaaaaaaaaaaaaaaaaaaaaaaaaaaaaaaaaaaaaaaaaaaaaaaaaaaaaaaaaaaaaaaaaaaaaaaaaaaaaaaaaaaaaaaaaaaaaaaaaaaaaaaaaaaaaaaaaaaaaaaaaaaaaaaaaaaaaaaaaaaaaaaaaaaaaaaaaaaaaaaaaaaaaaaaaaaaaaaaaaaaaaaaaaaaaaaaaaaaaaaaaaaaaaaaaaaaaaaaaaaaaaaaaaaaaaaaaaaaaaaaaaaaaaaaaaaaaaaaaaaaaaaaaaaaaaaaaaaaaaaaaaaaaaaaaaaaaaaaaaaaaaaaaaaaaaaaaaaaaaaaaaaaaaaaaaaaaaaaaaaaaaaaaaaaaaaaaaaaaaaaaaaaaaaaaaaaaaaaaaaaaaaaaaaaaaaaaaaaaaaaaaaaaaaaaaaaaaaaaaaaaaaaaaaaaaaaaaaaaaaaaaaaaaaaaaaaaaaaaaaaaaaaaaaaaaaaaaaaaaaaaaaaaaaaaaaaaaaaaaaaaaaaaaaaaaaaaaaaaaaaaaaaaaaaaaaaaaaaaaaaaaaaaaaaaaaaaaaaaaaaaaaaaaaaaaaaaaaaaaaaaaaaaaaaaaaaaaaaaaaaaaaaaaaaaaaaaaaaaaaaaaaaaaaaaaaaaaaaaaaaaaaaaaaaaaaaaaaaaaaaaaaaaaaaaaaaaaaaaaaaaaaaaaaaaaaaaaaaaaaaaaaaaaaaaaaaaaaaaaaaaaaaaaaaaaaaaaaaaaaaaaaaaaaaaaaaaaaaaaaaaaaaaaaaaaaaaaaaaaaaaaaaaaaaaaaaaaaaaaaaaaaaaaaaaaaaaaaaaaaaaaaaaaaaaaaaaaaaaaaaaaaaaaaaaaaaaaaaaaaaaaaaaaaaaaaaaaaaaaaaaaaaaaaaaaaaaaaaaaaaaaaaaaaaaaaaaaaaaaaaaaaaaaaaaaaaaaaaaaaaaaaaaaaaaaaaaaaaaaaaaaaaaaaaaaaaaaaaaaaaaaaaaaaaaaaaaaaaaaaaaaaaaaaaaaaaaaaaaaaaaaaaaaaaaaaaaaaaaaaaaaaaaaaaaaaaaaaaaaaaaaaaaaaaaaaaaaaaaaaaaaaaaaaaaaaaaaaaaaaaaaaaaaaaaaaaaaaaaaaaaaaaaaaaaaaaaaaaaaaaaaaaaaaaaaaaaaaaaaaaaaaaaaaaaaaaaaaaaaaaaaaaaaaaaaaaaaaaaaaaaaaaaaaaaaaaaaaaaaaaaaaaaaaaaaaaaaaaaaaaaaaaaaaaaaaaaaaaaaaaaaaaaaaaaaaaaaaaaaaaaaaaaaaaaaaaaaaaaaaaaaaaaaaaaaaaaaaaaaaaaaaaaaaaaaaaaaaaaaaaaaaaaaaaaaaaaaaaaaaaaaaaaaaaaaaaaaaaaaaaaaaaaaaaaaaaaaaaaaaaaaaaaaaaaaaaaaaaaaaaaaaaaaaaaaaaaaaaaaaaaaaaaaaaaaaaaaaaaaaaaaaaaaaaaaaaaaaaaaaaaaaaaaaaaaaaaaaaaaaaaaaaaaaaaaaaaaaaaaaaaaaaaaaaaaaaaaaaaaaaaaaaaaaaaaaaaaaaaaaaaaaaaaaaaaaaaaaaaaaaaaaaaaaaaaaaaaaaaaaaaaaaaaaaaaaaaaaaaaaaaaaaaaaaaaaaaaaaaaaaaaaaaaaaaaaaaaaaaaaaaaaaaaaaaaaaaaaaaaaaaaaaaaaaaaaaaaaaaaaaaaaaaaaaaaaaaaaaaaaaaaaaaaaaaaaaaaaaaaaaaaaaaaaaaaaaaaaaaaaaaaaaaaaaaaaaaaaaaaaaaaaaaaaaaaaaaaaaaaaaaaaaaaaaaaaaaaaaaaaaaaaaaaaaaaaaaaaaaaaaaaaaaaaaaaaaaaaaaaaaaaaaaaaaaaaaaaaaaaaaaaaaaaaaaaaaaaaaaaaaaaaaaaaaaaaaaaaaaaaaaaaaaaaaaaaaaaaaaaaaaaaaaaaaaaaaaaaaaaaaaa

SEQ ID NO: 6597 - RNA, 13 nt, Artificial Sequence
  source: /note="Description of Artificial Sequence: Synthetic oligonucleotide"
uagcaaguuaaaa

SEQ ID NO: 6598 - RNA, 13 nt, Artificial Sequence
  source: /note="Description of Artificial Sequence: Synthetic oligonucleotide"
uagcaaguuuaaa

SEQ ID NO: 6599 - RNA, 47 nt, Artificial Sequence
  source: /note="Description of Artificial Sequence: Synthetic oligonucleotide"
uaaggcuaguccguuaucaacuugaaaaaguggcaccgagucggugc

SEQ ID NO: 6600 - RNA, 51 nt, Artificial Sequence
  source: /note="Description of Artificial Sequence: Synthetic oligonucleotide"
uaaggcuaguccguuaucaacuugaaaaaguggcaccgagucggugcuuuu

SEQ ID NO: 6601 - RNA, 76 nt, Artificial Sequence
  source: /note="Description of Artificial Sequence: Synthetic oligonucleotide"
guuuuagagcuagaaauagcaaguuaaaauaaggcuaguccguuaucaacuugaaaaaguggcaccgagucggugc

SEQ ID NO: 6602 - RNA, 76 nt, Artificial Sequence
  source: /note="Description of Artificial Sequence: Synthetic oligonucleotide"
guuuaagagcuagaaauagcaaguuuaaauaaggcuaguccguuaucaacuugaaaaaguggcaccgagucggugc

SEQ ID NO: 6603 - RNA, 86 nt, Artificial Sequence
  source: /note="Description of Artificial Sequence: Synthetic oligonucleotide"
guuuuagagcuaugcuggaaacagcauagcaaguuaaaauaaggcuaguccguuaucaacuugaaaaaguggcaccgagucggugc

SEQ ID NO: 6604 - RNA, 86 nt, Artificial Sequence
  source: /note="Description of Artificial Sequence: Synthetic oligonucleotide"
guuuaagagcuaugcuggaaacagcauagcaaguuuaaauaaggcuaguccguuaucaacuugaaaaaguggcaccgagucggugc

SEQ ID NO: 6605 - RNA, 17 nt, Artificial Sequence
  source: /note="Description of Artificial Sequence: Synthetic oligonucleotide"
guuuuagagcuaugcug

SEQ ID NO: 6606 - RNA, 17 nt, Artificial Sequence
  source: /note="Description of Artificial Sequence: Synthetic oligonucleotide"
guuuaagagcuaugcug

SEQ ID NO: 6607 - RNA, 22 nt, Artificial Sequence
  source: /note="Description of Artificial Sequence: Synthetic oligonucleotide"
guuuuagagcuaugcuguuuug

SEQ ID NO: 6608 - RNA, 22 nt, Artificial Sequence
  source: /note="Description of Artificial Sequence: Synthetic oligonucleotide"
guuuaagagcuaugcuguuuug

SEQ ID NO: 6609 - RNA, 65 nt, Artificial Sequence
  source: /note="Description of Artificial Sequence: Synthetic oligonucleotide"
cagcauagcaaguuaaaauaaggcuaguccguuaucaacuugaaaaaguggcaccgagucggugc

SEQ ID NO: 6610 - RNA, 65 nt, Artificial Sequence
  source: /note="Description of Artificial Sequence: Synthetic oligonucleotide"
cagcauagcaaguuuaaauaaggcuaguccguuaucaacuugaaaaaguggcaccgagucggugc

SEQ ID NO: 6611 - protein, 1368 aa, Streptococcus pyogenes [sequence omitted]

SEQ ID NO: 6612 - protein, 7 aa, Simian virus 40
PKKKRKV

SEQ ID NO: 6613 - protein, 16 aa, Unknown
  source: /note="Description of Unknown: Nucleoplasmin bipartite NLS sequence"
KRPAATKKAGQAKKKK

SEQ ID NO: 6614 - protein, 9 aa, Unknown
  source: /note="Description of Unknown: C-myc NLS sequence"
PAAKRVKLD

SEQ ID NO: 6615 - protein, 11 aa, Unknown
  source: /note="Description of Unknown: C-myc NLS sequence"
RQRRNELKRSP

SEQ ID NO: 6616 - protein, 38 aa, Homo sapiens
NQSSNFGPMKGGNFGGRSSGPYGGGGQYFAKPRNQGGY

SEQ ID NO: 6617 - protein, 42 aa, Unknown
  source: /note="Description of Unknown: IBB domain from importin-alpha sequence"
RMRIZFKNKGKDTAELRRRRVEVSVELRKAKKDEQILKRRNV

SEQ ID NO: 6618 - protein, 8 aa, Unknown
  source: /note="Description of Unknown: Myoma T protein sequence"
VSRKRPRP

SEQ ID NO: 6619 - protein, 8 aa, Unknown
  source: /note="Description of Unknown: Myoma T protein sequence"
PPKKARED

SEQ ID NO: 6620 - protein, 8 aa, Homo sapiens
PQPKKKPL

SEQ ID NO: 6621 - protein, 12 aa, Mus musculus
SALIKKKKKMAP

SEQ ID NO: 6622 - protein, 5 aa, Influenza virus
DRLRR

SEQ ID NO: 6623 - protein, 7 aa, Influenza virus
PKQKKRK

SEQ ID NO: 6624 - protein, 10 aa, Hepatitis delta virus
RKLKKKIKKL

SEQ ID NO: 6625 - protein, 10 aa, Mus musculus
REKKKFLKRR

SEQ ID NO: 6626 - protein, 20 aa, Homo sapiens
KRKGDEVDGVDEVAKKKSKK

SEQ ID NO: 6627 - protein, 17 aa, Homo sapiens
RKCLQAGMNLEARKTKK

SEQ ID NO: 6628 - DNA, 4107 bp, Artificial Sequence
  source: /note="Description of Artificial Sequence: Synthetic polynucleotide"
atggataaaaagtacagcatcgggctggacatcggtacaaactcagtggggtgggccgtgattacggacgagtacaaggtaccctccaaaaaatttaaagtgctgggtaacacggacagacactctataaagaaaaatcttattggagccttgctgttcgactcaggcgagacagccgaagccacaaggttgaagcggaccgccaggaggcggtataccaggagaaagaaccgcatatgctacctgcaagaaatcttcagtaacgagatggcaaaggttgacgatagctttttccatcgcctggaagaatcctttcttgttgaggaagacaagaagcacgaacggcaccccatctttggcaatattgtcgacgaagtggcatatcacgaaaagtacccgactatctaccacctcaggaagaagctggtggactctaccgataaggcggacctcagacttatttatttggcactcgcccacatgattaaatttagaggacatttcttgatcgagggcgacctgaacccggacaacagtgacgtcgataagctgttcatccaacttgtgcagacctacaatcaactgttcgaagaaaaccctataaatgcttcaggagtcgacgctaaagcaatcctgtccgcgcgcctctcaaaatctagaagacttgagaatctgattgctcagttgcccggggaaaagaaaaatggattgtttggcaacctgatcgccctcagtctcggactgaccccaaatttcaaaagtaacttcgacctggccgaagacgctaagctccagctgtccaaggacacatacgatgacgacctcgacaatctgctggcccagattggggatcagtacgccgatctctttttggcagcaaagaacctgtccgacgccatcctgttgagcgatatcttgagagtgaacaccgaaattactaaagcaccccttagcgcatctatgatcaagcggtacgacgagcatcatcaggatctgaccctgctgaaggctcttgtgaggcaacagctccccgaaaaatacaaggaaatcttctttgaccagagcaaaaacggctacgctggctatatagatggtggggccagtcaggaggaattctataaattcatcaagcccattctcgagaaaatggacggcacagaggagttgctggtcaaacttaacagggaggacctgctgcggaagcagcggacctttgacaacgggtctatcccccaccagattcatctgggcgaactgcacgcaatcctgaggaggcaggaggatttttatccttttcttaaagataaccgcgagaaaatagaaaagattcttacattcaggatcccgtactacgtgggacctctcgcccggggcaattcacggtttgcctggatgacaaggaagtcagaggagactattacaccttggaacttcgaagaagtggtggacaagggtgcatctgcccagtctttcatcgagcggatgacaaattttgacaagaacctccctaatgagaaggtgctgcccaaacattctctgctctacgagtactttaccgtctacaatgaactgactaaagtcaagtacgtcaccgagggaatgaggaagccggcattccttagtggagaacagaagaaggcgattgtagacctgttgttcaagaccaacaggaaggtgactgtgaagcaacttaaagaagactactttaagaagatcgaatgttttgacagtgtggaaatttcaggggttgaagaccgcttcaatgcgtcattggggacttaccatgatcttctcaagatcataaaggacaaagacttcctggacaacgaagaaaatgaggatattctcgaagacatcgtcctcaccctgaccctgttcgaagacagggaaatgatagaagagcgcttgaaaacctatgcccacctcttcgacgataaagttatgaagcagctgaagcgcaggagatacacaggatggggaagattgtcaaggaagctgatcaatggaattagggataaacagagtggcaagaccatactggatttcctcaaatctgatggcttcgccaataggaacttcatgcaactgattcacgatgactctcttaccttcaaggaggacattcaaaaggctcaggtgagcgggcagggagactcccttcatgaacacatcgcgaatttggcaggttcccccgctattaaaaagggcatccttcaaactgtcaaggtggtggatgaattggtcaaggtaatgggcagacataagccagaaaatattgtgatcgagatggcccgcgaaaaccagaccacacagaagggccagaaaaatagtagagagcggatgaagaggatcgaggagggcatcaaagagctgggatctcagattctcaaagaacaccccgtagaaaacacacagctgcagaacgaaaaattgtacttgtactatctgcagaacggcagagacatgtacgtcgaccaagaacttgatattaatagactgtccgactatgacgtagaccatatcgtgccccagtccttcctgaaggacgactccattgataacaaagtcttgacaagaagcgacaagaacaggggtaaaagtgataatgtgcctagcgaggaggtggtgaaaaaaatgaagaactactggcgacagctgcttaatgcaaagctcattacacaacggaagttcgataatctgacgaaagcagagagaggtggcttgtctgagttggacaaggcagggtttattaagcggcagctggtggaaactaggcagatcacaaagcacgtggcgcagattttggacagccggatgaacacaaaatacgacgaaaatgataaactgatacgagaggtcaaagttatcacgctgaaaagcaagctggtgtccgattttcggaaagacttccagttctacaaagttcgcgagattaataactaccatcatgctcacgatgcgtacctgaacgctgttgtcgggaccgccttgataaagaagtacccaaagctggaatccgagttcgtatacggggattacaaagtgtacgatgtgaggaaaatgatagccaagtccgagcaggagattggaaaggccacagctaagtacttcttttattctaacatcatgaatttttttaagacggaaattaccctggccaacggagagatcagaaagcggccccttatagagacaaatggtgaaacaggtgaaatcgtctgggataagggcagggatttcgctactgtgaggaaggtgctgagtatgccacaggtaaatatcgtgaaaaaaaccgaagtacagaccggaggattttccaaggaaagcattttgcctaaaagaaactcagacaagctcatcgcccgcaagaaagattgggaccctaagaaatacgggggatttgactcacccaccgtagcctattctgtgctggtggtagctaaggtggaaaaaggaaagtctaagaagctgaagtccgtgaaggaactcttgggaatcactatcatggaaagatcatcctttgaaaagaaccctatcgatttcctggaggctaagggttacaaggaggtcaagaaagacctcatcattaaactgccaaaatactctctcttcgagctggaaaatggcaggaagagaatgttggccagcgccggagagctgcaaaagggaaacgagcttgctctgccctccaaatatgttaattttctctatctcgcttcccactatgaaaagctgaaagggtctcccgaagataacgagcagaagcagctgttcgtcgaacagcacaagcactatctggatgaaataatcgaacaaataagcgagttcagcaaaagggttatcctggcggatgctaatttggacaaagtactgtctgcttataacaagcaccgggataagcctattagggaacaagccgagaatataattcacctctttacactcacgaatctcggagcccccgccgccttcaaatactttgatacgactatcgaccggaaacggtataccagtaccaaagaggtcctcgatgccaccctcatccaccagtcaattactggcctgtacgaaacacggatcgacctctctcaactgggcggcgactag

SEQ ID NO: 6629-6659 - skipped (31 entries)

SEQ ID NO: 6660 - RNA, 74 nt, Artificial Sequence; identical to SEQ ID NO: 346
  source: /note="Description of Artificial Sequence: Synthetic oligonucleotide"

SEQ ID NO: 6661 - RNA, 74 nt, Artificial Sequence
  source: /note="Description of Artificial Sequence: Synthetic oligonucleotide"
aacagcauagcaaguuuaaauaaggcuaguccguuaucaacuugaaaaaguggcaccgagucggugcuuuuuuu

SEQ ID NO: 6662-7805 - skipped (1144 entries)

SEQ ID NO: 7806 - RNA, 16 nt, Artificial Sequence
  source: /note="Description of Artificial Sequence: Synthetic oligonucleotide"
guuuuagagcuaugcu

SEQ ID NO: 7807 - RNA, 90 nt, Artificial Sequence
  source: /note="Description of Artificial Sequence: Synthetic oligonucleotide"
guuuaagagcuaugcuggaaacagcauagcaaguuuaaauaaggcuaguccguuaucaacuugaaaaaguggcaccgagucggugcuuuu

SEQ ID NO: 7808 - RNA, 67 nt, Artificial Sequence
  source: /note="Description of Artificial Sequence: Synthetic oligonucleotide"
agcauagcaaguuaaaauaaggcuaguccguuaucaacuugaaaaaguggcaccgagucggugcuuu

SEQ ID NO: 7809 - RNA, 85 nt, Artificial Sequence
  source: /note="Description of Artificial Sequence: Synthetic oligonucleotide"
guuggaaccauucaaaacagcauagcaaguuaaaauaaggcuaguccguuaucaacuugaaaaaguggcaccgagucggugcuuu

SEQ ID NO: 7810 - protein, 7 aa, Tobacco etch virus
ENLYFQG

SEQ ID NO: 7811 - RNA, 80 nt, Artificial Sequence
  source: /note="Description of Artificial Sequence: Synthetic oligonucleotide"
guuuuagagcuagaaauagcaaguuaaaauaaggcuaguccguuaucaacuugaaaaaguggcaccgagucggugcuuuu

SEQ ID NO: 7812 - RNA, 67 nt, Artificial Sequence
  source: /note="Description of Artificial Sequence: Synthetic oligonucleotide"
aacagcauagcaaguuaaaauaaggcuaguccguuaucaacuugaaaaaguggcaccgagucggugc

SEQ ID NO: 7813-7820 - skipped (8 entries)

SEQ ID NO: 7821 - protein, 1393 aa, Artificial Sequence
  source: /note="Description of Artificial Sequence: Synthetic polypeptide"
MAPKKKRKVDKKYSIGLDIGTNSVGWAVITDEYKVPSKKFKVLGNTDRHSIKKNLIGALLFDSGETAEATRLKRTARRRYTRRKNRICYLQEIFSNEMAKVDDSFFHRLEESFLVEEDKKHERHPIFGNIVDEVAYHEKYPTIYHLRKKLVDSTDKADLRLIYLALAHMIKFRGHFLIEGDLNPDNSDVDKLFIQLVQTYNQLFEENPINASGVDAKAILSARLSKSRRLENLIAQLPGEKKNGLFGNLIALSLGLTPNFKSNFDLAEDAKLQLSKDTYDDDLDNLLAQIGDQYADLFLAAKNLSDAILLSDILRVNTEITKAPLSASMIKRYDEHHQDLTLLKALVRQQLPEKYKEIFFDQSKNGYAGYIDGGASQEEFYKFIKPILEKMDGTEELLVKLNREDLLRKQRTFDNGSIPHQIHLGELHAILRRQEDFYPFLKDNREKIEKILTFRIPYYVGPLARGNSRFAWMTRKSEETITPWNFEEVVDKGASAQSFIERMTNFDKNLPNEKVLPKHSLLYEYFTVYNELTKVKYVTEGMRKPAFLSGEQKKAIVDLLFKTNRKVTVKQLKEDYFKKIECFDSVEISGVEDRFNASLGTYHDLLKIIKDKDFLDNEENEDILEDIVLTLTLFEDREMIEERLKTYAHLFDDKVMKQLKRRRYTGWGRLSRKLINGIRDKQSGKTILDFLKSDGFANRNFMQLIHDDSLTFKEDIQKAQVSGQGDSLHEHIANLAGSPAIKKGILQTVKVVDELVKVMGRHKPENIVIEMARENQTTQKGQKNSRERMKRIEEGIKELGSQILKEHPVENTQLQNEKLYLYYLQNGRDMYVDQELDINRLSDYDVDHIVPQSFLKDDSIDNKVLTRSDKNRGKSDNVPSEEVVKKMKNYWRQLLNAKLITQRKFDNLTKAERGGLSELDKAGFIKRQLVETRQITKHVAQILDSRMNTKYDENDKLIREVKVITLKSKLVSDFRKDFQFYKVREINNYHHAHDAYLNAVVGTALIKKYPKLESEFVYGDYKVYDVRKMIAKSEQEIGKATAKYFFYSNIMNFFKTEITLANGEIRKRPLIETNGETGEIVWDKGRDFATVRKVLSMPQVNIVKKTEVQTGGFSKESILPKRNSDKLIARKKDWDPKKYGGFDSPTVAYSVLVVAKVEKGKSKKLKSVKELLGITIMERSSFEKNPIDFLEAKGYKEVKKDLIIKLPKYSLFELENGRKRMLASAGELQKGNELALPSKYVNFLYLASHYEKLKGSPEDNEQKQLFVEQHKHYLDEIIEQISEFSKRVILADANLDKVLSAYNKHRDKPIREQAENIIHLFTLTNLGAPAAFKYFDTTIDRKRYTSTKEVLDATLIHQSITGLYETRIDLSQLGGDSRADPKKKRKVHHHHHH

SEQ ID NO: 7822 - protein, 1393 aa, Artificial Sequence
  source: /note="Description of Artificial Sequence: Synthetic polypeptide"
MAPKKKRKVDKKYSIGLDIGTNSVGWAVITDEYKVPSKKFKVLGNTDRHSIKKNLIGALLFDSGETAEATRLKRTARRRYTRRKNRILYLQEIFSNEMAKVDDSFFHRLEESFLVEEDKKHERHPIFGNIVDEVAYHEKYPTIYHLRKKLVDSTDKADLRLIYLALAHMIKFRGHFLIEGDLNPDNSDVDKLFIQLVQTYNQLFEENPINASGVDAKAILSARLSKSRRLENLIAQLPGEKKNGLFGNLIALSLGLTPNFKSNFDLAEDAKLQLSKDTYDDDLDNLLAQIGDQYADLFLAAKNLSDAILLSDILRVNTEITKAPLSASMIKRYDEHHQDLTLLKALVRQQLPEKYKEIFFDQSKNGYAGYIDGGASQEEFYKFIKPILEKMDGTEELLVKLNREDLLRKQRTFDNGSIPHQIHLGELHAILRRQEDFYPFLKDNREKIEKILTFRIPYYVGPLARGNSRFAWMTRKSEETITPWNFEEVVDKGASAQSFIERMTNFDKNLPNEKVLPKHSLLYEYFTVYNELTKVKYVTEGMRKPAFLSGEQKKAIVDLLFKTNRKVTVKQLKEDYFKKIEEFDSVEISGVEDRFNASLGTYHDLLKIIKDKDFLDNEENEDILEDIVLTLTLFEDREMIEERLKTYAHLFDDKVMKQLKRRRYTGWGRLSRKLINGIRDKQSGKTILDFLKSDGFANRNFMQLIHDDSLTFKEDIQKAQVSGQGDSLHEHIANLAGSPAIKKGILQTVKVVDELVKVMGRHKPENIVIEMARENQTTQKGQKNSRERMKRIEEGIKELGSQILKEHPVENTQLQNEKLYLYYLQNGRDMYVDQELDINRLSDYDVDHIVPQSFLKDDSIDNKVLTRSDKNRGKSDNVPSEEVVKKMKNYWRQLLNAKLITQRKFDNLTKAERGGLSELDKAGFIKRQLVETRQITKHVAQILDSRMNTKYDENDKLIREVKVITLKSKLVSDFRKDFQFYKVREINNYHHAHDAYLNAVVGTALIKKYPKLESEFVYGDYKVYDVRKMIAKSEQEIGKATAKYFFYSNIMNFFKTEITLANGEIRKRPLIETNGETGEIVWDKGRDFATVRKVLSMPQVNIVKKTEVQTGGFSKESILPKRNSDKLIARKKDWDPKKYGGFDSPTVAYSVLVVAKVEKGKSKKLKSVKELLGITIMERSSFEKNPIDFLEAKGYKEVKKDLIIKLPKYSLFELENGRKRMLASAGELQKGNELALPSKYVNFLYLASHYEKLKGSPEDNEQKQLFVEQHKHYLDEIIEQISEFSKRVILADANLDKVLSAYNKHRDKPIREQAENIIHLFTLTNLGAPAAFKYFDTTIDRKRYTSTKEVLDATLIHQSITGLYETRIDLSQLGGDSRADPKKKRKVHHHHHH

SEQ ID NO: 7823 - protein, 1399 aa, Artificial Sequence
  source: /note="Description of Artificial Sequence: Synthetic polypeptide"
MGSSHHHHHHHHENLYFQGSMDKKYSIGLDIGTNSVGWAVITDEYKVPSKKFKVLGNTDRHSIKKNLIGALLFDSGETAEATRLKRTARRRYTRRKNRICYLQEIFSNEMAKVDDSFFHRLEESFLVEEDKKHERHPIFGNIVDEVAYHEKYPTIYHLRKKLVDSTDKADLRLIYLALAHMIKFRGHFLIEGDLNPDNSDVDKLFIQLVQTYNQLFEENPINASGVDAKAILSARLSKSRRLENLIAQLPGEKKNGLFGNLIALSLGLTPNFKSNFDLAEDAKLQLSKDTYDDDLDNLLAQIGDQYADLFLAAKNLSDAILLSDILRVNTEITKAPLSASMIKRYDEHHQDLTLLKALVRQQLPEKYKEIFFDQSKNGYAGYIDGGASQEEFYKFIKPILEKMDGTEELLVKLNREDLLRKQRTFDNGSIPHQIHLGELHAILRRQEDFYPFLKDNREKIEKILTFRIPYYVGPLARGNSRFAWMTRKSEETITPWNFEEVVDKGASAQSFIERMTNFDKNLPNEKVLPKHSLLYEYFTVYNELTKVKYVTEGMRKPAFLSGEQKKAIVDLLFKTNRKVTVKQLKEDYFKKIECFDSVEISGVEDRFNASLGTYHDLLKIIKDKDFLDNEENEDILEDIVLTLTLFEDREMIEERLKTYAHLFDDKVMKQLKRRRYTGWGRLSRKLINGIRDKQSGKTILDFLKSDGFANRNFMQLIHDDSLTFKEDIQKAQVSGQGDSLHEHIANLAGSPAIKKGILQTVKVVDELVKVMGRHKPENIVIEMARENQTTQKGQKNSRERMKRIEEGIKELGSQILKEHPVENTQLQNEKLYLYYLQNGRDMYVDQELDINRLSDYDVDHIVPQSFLKDDSIDNKVLTRSDKNRGKSDNVPSEEVVKKMKNYWRQLLNAKLITQRKFDNLTKAERGGLSELDKAGFIKRQLVETRQITKHVAQILDSRMNTKYDENDKLIREVKVITLKSKLVSDFRKDFQFYKVREINNYHHAHDAYLNAVVGTALIKKYPKLESEFVYGDYKVYDVRKMIAKSEQEIGKATAKYFFYSNIMNFFKTEITLANGEIRKRPLIETNGETGEIVWDKGRDFATVRKVLSMPQVNIVKKTEVQTGGFSKESILPKRNSDKLIARKKDWDPKKYGGFDSPTVAYSVLVVAKVEKGKSKKLKSVKELLGITIMERSSFEKNPIDFLEAKGYKEVKKDLIIKLPKYSLFELENGRKRMLASAGELQKGNELALPSKYVNFLYLASHYEKLKGSPEDNEQKQLFVEQHKHYLDEIIEQISEFSKRVILADANLDKVLSAYNKHRDKPIREQAENIIHLFTLTNLGAPAAFKYFDTTIDRKRYTSTKEVLDATLIHQSITGLYETRIDLSQLGGDGGGSPKKKRKV

SEQ ID NO: 7824 - protein, 1396 aa, Artificial Sequence
  source: /note="Description of Artificial Sequence: Synthetic polypeptide"
MAHHHHHHGGSPKKKRKVDKKYSIGLDIGTNSVGWAVITDEYKVPSKKFKVLGNTDRHSIKKNLIGALLFDSGETAEATRLKRTARRRYTRRKNRICYLQEIFSNEMAKVDDSFFHRLEESFLVEEDKKHERHPIFGNIVDEVAYHEKYPTIYHLRKKLVDSTDKADLRLIYLALAHMIKFRGHFLIEGDLNPDNSDVDKLFIQLVQTYNQLFEENPINASGVDAKAILSARLSKSRRLENLIAQLPGEKKNGLFGNLIALSLGLTPNFKSNFDLAEDAKLQLSKDTYDDDLDNLLAQIGDQYADLFLAAKNLSDAILLSDILRVNTEITKAPLSASMIKRYDEHHQDLTLLKALVRQQLPEKYKEIFFDQSKNGYAGYIDGGASQEEFYKFIKPILEKMDGTEELLVKLNREDLLRKQRTFDNGSIPHQIHLGELHAILRRQEDFYPFLKDNREKIEKILTFRIPYYVGPLARGNSRFAWMTRKSEETITPWNFEEVVDKGASAQSFIERMTNFDKNLPNEKVLPKHSLLYEYFTVYNELTKVKYVTEGMRKPAFLSGEQKKAIVDLLFKTNRKVTVKQLKEDYFKKIECFDSVEISGVEDRFNASLGTYHDLLKIIKDKDFLDNEENEDILEDIVLTLTLFEDREMIEERLKTYAHLFDDKVMKQLKRRRYTGWGRLSRKLINGIRDKQSGKTILDFLKSDGFANRNFMQLIHDDSLTFKEDIQKAQVSGQGDSLHEHIANLAGSPAIKKGILQTVKVVDELVKVMGRHKPENIVIEMARENQTTQKGQKNSRERMKRIEEGIKELGSQILKEHPVENTQLQNEKLYLYYLQNGRDMYVDQELDINRLSDYDVDHIVPQSFLKDDSIDNKVLTRSDKNRGKSDNVPSEEVVKKMKNYWRQLLNAKLITQRKFDNLTKAERGGLSELDKAGFIKRQLVETRQITKHVAQILDSRMNTKYDENDKLIREVKVITLKSKLVSDFRKDFQFYKVREINNYHHAHDAYLNAVVGTALIKKYPKLESEFVYGDYKVYDVRKMIAKSEQEIGKATAKYFFYSNIMNFFKTEITLANGEIRKRPLIETNGETGEIVWDKGRDFATVRKVLSMPQVNIVKKTEVQTGGFSKESILPKRNSDKLIARKKDWDPKKYGGFDSPTVAYSVLVVAKVEKGKSKKLKSVKELLGITIMERSSFEKNPIDFLEAKGYKEVKKDLIIKLPKYSLFELENGRKRMLASAGELQKGNELALPSKYVNFLYLASHYEKLKGSPEDNEQKQLFVEQHKHYLDEIIEQISEFSKRVILADANLDKVLSAYNKHRDKPIREQAENIIHLFTLTNLGAPAAFKYFDTTIDRKRYTSTKEVLDATLIHQSITGLYETRIDLSQLGGDSRADPKKKRKV

SEQ ID NO: 7825 - protein, 1386 aa, Artificial Sequence
  source: /note="Description of Artificial Sequence: Synthetic polypeptide"
MAPKKKRKVDKKYSIGLDIGTNSVGWAVITDEYKVPSKKFKVLGNTDRHSIKKNLIGALLFDSGETAEATRLKRTARRRYTRRKNRICYLQEIFSNEMAKVDDSFFHRLEESFLVEEDKKHERHPIFGNIVDEVAYHEKYPTIYHLRKKLVDSTDKADLRLIYLALAHMIKFRGHFLIEGDLNPDNSDVDKLFIQLVQTYNQLFEENPINASGVDAKAILSARLSKSRRLENLIAQLPGEKKNGLFGNLIALSLGLTPNFKSNFDLAEDAKLQLSKDTYDDDLDNLLAQIGDQYADLFLAAKNLSDAILLSDILRVNTEITKAPLSASMIKRYDEHHQDLTLLKALVRQQLPEKYKEIFFDQSKNGYAGYIDGGASQEEFYKFIKPILEKMDGTEELLVKLNREDLLRKQRTFDNGSIPHQIHLGELHAILRRQEDFYPFLKDNREKIEKILTFRIPYYVGPLARGNSRFAWMTRKSEETITPWNFEEVVDKGASAQSFIERMTNFDKNLPNEKVLPKHSLLYEYFTVYNELTKVKYVTEGMRKPAFLSGEQKKAIVDLLFKTNRKVTVKQLKEDYFKKIECFDSVEISGVEDRFNASLGTYHDLLKIIKDKDFLDNEENEDILEDIVLTLTLFEDREMIEERLKTYAHLFDDKVMKQLKRRRYTGWGRLSRKLINGIRDKQSGKTILDFLKSDGFANRNFMQLIHDDSLTFKEDIQKAQVSGQGDSLHEHIANLAGSPAIKKGILQTVKVVDELVKVMGRHKPENIVIEMARENQTTQKGQKNSRERMKRIEEGIKELGSQILKEHPVENTQLQNEKLYLYYLQNGRDMYVDQELDINRLSDYDVDHIVPQSFLKDDSIDNKVLTRSDKNRGKSDNVPSEEVVKKMKNYWRQLLNAKLITQRKFDNLTKAERGGLSELDKAGFIKRQLVETRQITKHVAQILDSRMNTKYDENDKLIREVKVITLKSKLVSDFRKDFQFYKVREINNYHHAHDAYLNAVVGTALIKKYPKLESEFVYGDYKVYDVRKMIAKSEQEIGKATAKYFFYSNIMNFFKTEITLANGEIRKRPLIETNGETGEIVWDKGRDFATVRKVLSMPQVNIVKKTEVQTGGFSKESILPKRNSDKLIARKKDWDPKKYGGFDSPTVAYSVLVVAKVEKGKSKKLKSVKELLGITIMERSSFEKNPIDFLEAKGYKEVKKDLIIKLPKYSLFELENGRKRMLASAGELQKGNELALPSKYVNFLYLASHYEKLKGSPEDNEQKQLFVEQHKHYLDEIIEQISEFSKRVILADANLDKVLSAYNKHRDKPIREQAENIIHLFTLTNLGAPAAFKYFDTTIDRKRYTSTKEVLDATLIHQSITGLYETRIDLSQLGGDSRADHHHHHH

SEQ ID NO: 7826 - protein, 1389 aa, Artificial Sequence
  source: /note="Description of Artificial Sequence: Synthetic polypeptide"
MAHHHHHHGGSDKKYSIGLDIGTNSVGWAVITDEYKVPSKKFKVLGNTDRHSIKKNLIGALLFDSGETAEATRLKRTARRRYTRRKNRICYLQEIFSNEMAKVDDSFFHRLEESFLVEEDKKHERHPIFGNIVDEVAYHEKYPTIYHLRKKLVDSTDKADLRLIYLALAHMIKFRGHFLIEGDLNPDNSDVDKLFIQLVQTYNQLFEENPINASGVDAKAILSARLSKSRRLENLIAQLPGEKKNGLFGNLIALSLGLTPNFKSNFDLAEDAKLQLSKDTYDDDLDNLLAQIGDQYADLFLAAKNLSDAILLSDILRVNTEITKAPLSASMIKRYDEHHQDLTLLKALVRQQLPEKYKEIFFDQSKNGYAGYIDGGASQEEFYKFIKPILEKMDGTEELLVKLNREDLLRKQRTFDNGSIPHQIHLGELHAILRRQEDFYPFLKDNREKIEKILTFRIPYYVGPLARGNSRFAWMTRKSEETITPWNFEEVVDKGASAQSFIERMTNFDKNLPNEKVLPKHSLLYEYFTVYNELTKVKYVTEGMRKPAFLSGEQKKAIVDLLFKTNRKVTVKQLKEDYFKKIECFDSVEISGVEDRFNASLGTYHDLLKIIKDKDFLDNEENEDILEDIVLTLTLFEDREMIEERLKTYAHLFDDKVMKQLKRRRYTGWGRLSRKLINGIRDKQSGKTILDFLKSDGFANRNFMQLIHDDSLTFKEDIQKAQVSGQGDSLHEHIANLAGSPAIKKGILQTVKVVDELVKVMGRHKPENIVIEMARENQTTQKGQKNSRERMKRIEEGIKELGSQILKEHPVENTQLQNEKLYLYYLQNGRDMYVDQELDINRLSDYDVDHIVPQSFLKDDSIDNKVLTRSDKNRGKSDNVPSEEVVKKMKNYWRQLLNAKLITQRKFDNLTKAERGGLSELDKAGFIKRQLVETRQITKHVAQILDSRMNTKYDENDKLIREVKVITLKSKLVSDFRKDFQFYKVREINNYHHAHDAYLNAVVGTALIKKYPKLESEFVYGDYKVYDVRKMIAKSEQEIGKATAKYFFYSNIMNFFKTEITLANGEIRKRPLIETNGETGEIVWDKGRDFATVRKVLSMPQVNIVKKTEVQTGGFSKESILPKRNSDKLIARKKDWDPKKYGGFDSPTVAYSVLVVAKVEKGKSKKLKSVKELLGITIMERSSFEKNPIDFLEAKGYKEVKKDLIIKLPKYSLFELENGRKRMLASAGELQKGNELALPSKYVNFLYLASHYEKLKGSPEDNEQKQLFVEQHKHYLDEIIEQISEFSKRVILADANLDKVLSAYNKHRDKPIREQAENIIHLFTLTNLGAPAAFKYFDTTIDRKRYTSTKEVLDATLIHQSITGLYETRIDLSQLGGDSRADPKKKRKV

SEQ ID NO: 7827 - protein, 1399 aa, Artificial Sequence; identical to SEQ ID NO: 7823
  source: /note="Description of Artificial Sequence: Synthetic polypeptide"

SEQ ID NO: 7828 - protein, 1393 aa, Artificial Sequence
  source: /note="Description of Artificial Sequence: Synthetic polypeptide"
MAPKKKRKVDKKYSIGLDIGTNSVGWAVITDEYKVPSKKFKVLGNTDRHSIKKNLIGALLFDSGETAEATRLKRTARRRYTRRKNRICYLQEIFSNEMAKVDDSFFHRLEESFLVEEDKKHERHPIFGNIVDEVAYHEKYPTIYHLRKKLVDSTDKADLRLIYLALAHMIKFRGHFLIEGDLNPDNSDVDKLFIQLVQTYNQLFEENPINASGVDAKAILSARLSKSRRLENLIAQLPGEKKNGLFGNLIALSLGLTPNFKSNFDLAEDAKLQLSKDTYDDDLDNLLAQIGDQYADLFLAAKNLSDAILLSDILRVNTEITKAPLSASMIKRYDEHHQDLTLLKALVRQQLPEKYKEIFFDQSKNGYAGYIDGGASQEEFYKFIKPILEKMDGTEELLVKLNREDLLRKQRTFDNGSIPHQIHLGELHAILRRQEDFYPFLKDNREKIEKILTFRIPYYVGPLARGNSRFAWMTRKSEETITPWNFEEVVDKGASAQSFIERMTNFDKNLPNEKVLPKHSLLYEYFTVYNELTKVKYVTEGMRKPAFLSGEQKKAIVDLLFKTNRKVTVKQLKEDYFKKIECFDSVEISGVEDRFNASLGTYHDLLKIIKDKDFLDNEENEDILEDIVLTLTLFEDREMIEERLKTYAHLFDDKVMKQLKRRRYTGWGRLSRKLINGIRDKQSGKTILDFLKSDGFANRNFMQLIHDDSLTFKEDIQKAQVSGQGDSLHEHIANLAGSPAIKKGILQTVKVVDELVKVMGRHKPENIVIEMARENQTTQKGQKNSRERMKRIEEGIKELGSQILKEHPVENTQLQNEKLYLYYLQNGRDMYVDQELDINRLSDYDVDHIVPQSFLKDDSIDNAVLTRSDKNRGKSDNVPSEEVVKKMKNYWRQLLNAKLITQRKFDNLTKAERGGLSELDKAGFIKRQLVETRQITKHVAQILDSRMNTKYDENDKLIREVKVITLKSKLVSDFRKDFQFYKVREINNYHHAHDAYLNAVVGTALIKKYPKLESEFVYGDYKVYDVRKMIAKSEQEIGKATAKYFFYSNIMNFFKTEITLANGEIRKRPLIETNGETGEIVWDKGRDFATVRKVLSMPQVNIVKKTEVQTGGFSKESILPKRNSDKLIARKKDWDPKKYGGFDSPTVAYSVLVVAKVEKGKSKKLKSVKELLGITIMERSSFEKNPIDFLEAKGYKEVKKDLIIKLPKYSLFELENGRKRMLASAGELQKGNELALPSKYVNFLYLASHYEKLKGSPEDNEQKQLFVEQHKHYLDEIIEQISEFSKRVILADANLDKVLSAYNKHRDKPIREQAENIIHLFTLTNLGAPAAFKYFDTTIDRKRYTSTKEVLDATLIHQSITGLYETRIDLSQLGGDSRADPKKKRKVHHHHHH

SEQ ID NO: 7829 - protein, 1393 aa, Artificial Sequence
  source: /note="Description of Artificial Sequence: Synthetic polypeptide"
MAPKKKRKVDKKYSIGLDIGTNSVGWAVITDEYKVPSKKFKVLGNTDRHSIKKNLIGALLFDSGETAEATRLKRTARRRYTRRKNRICYLQEIFSNEMAKVDDSFFHRLEESFLVEEDKKHERHPIFGNIVDEVAYHEKYPTIYHLRKKLVDSTDKADLRLIYLALAHMIKFRGHFLIEGDLNPDNSDVDKLFIQLVQTYNQLFEENPINASGVDAKAILSARLSKSRRLENLIAQLPGEKKNGLFGNLIALSLGLTPNFKSNFDLAEDAKLQLSKDTYDDDLDNLLAQIGDQYADLFLAAKNLSDAILLSDILRVNTEITKAPLSASMIKRYDEHHQDLTLLKALVRQQLPEKYKEIFFDQSKNGYAGYIDGGASQEEFYKFIKPILEKMDGTEELLVKLNREDLLRKQRTFDNGSIPHQIHLGELHAILRRQEDFYPFLKDNREKIEKILTFRIPYYVGPLARGNSRFAWMTRKSEETITPWNFEEVVDKGASAQSFIERMTNFDKNLPNEKVLPKHSLLYEYFTVYNELTKVKYVTEGMRKPAFLSGEQKKAIVDLLFKTNRKVTVKQLKEDYFKKIECFDSVEISGVEDRFNASLGTYHDLLKIIKDKDFLDNEENEDILEDIVLTLTLFEDREMIEERLKTYAHLFDDKVMKQLKRRRYTGWGRLSRKLINGIRDKQSGKTILDFLKSDGFANRNFMQLIHDDSLTFKEDIQKAQVSGQGDSLHEHIANLAGSPAIKKGILQTVKVVDELVKVMGRHKPENIVIEMARENQTTQKGQKNSRERMKRIEEGIKELGSQILKEHPVENTQLQNEALYLYYLQNGRDMYVDQELDINRLSDYDVDHIVPQSFLKDDSIDNKVLTRSDKNRGKSDNVPSEEVVKKMKNYWRQLLNAKLITQRKFDNLTKAERGGLSELDKAGFIKRQLVETRQITKHVAQILDSRMNTKYDENDKLIREVKVITLKSKLVSDFRKDFQFYKVREINNYHHAHDAYLNAVVGTALIKKYPALESEFVYGDYKVYDVRKMIAKSEQEIGKATAKYFFYSNIMNFFKTEITLANGEIRKAPLIETNGETGEIVWDKGRDFATVRKVLSMPQVNIVKKTEVQTGGFSKESILPKRNSDKLIARKKDWDPKKYGGFDSPTVAYSVLVVAKVEKGKSKKLKSVKELLGITIMERSSFEKNPIDFLEAKGYKEVKKDLIIKLPKYSLFELENGRKRMLASAGELQKGNELALPSKYVNFLYLASHYEKLKGSPEDNEQKQLFVEQHKHYLDEIIEQISEFSKRVILADANLDKVLSAYNKHRDKPIREQAENIIHLFTLTNLGAPAAFKYFDTTIDRKRYTSTKEVLDATLIHQSITGLYETRIDLSQLGGDSRADPKKKRKVHHHHHH

SEQ ID NO: 7830 - protein, 1393 aa, Artificial Sequence
  source: /note="Description of Artificial Sequence: Synthetic polypeptide"
MAPKKKRKVDKKYSIGLDIGTNSVGWAVITDEYKVPSKKFKVLGNTDRHSIKKNLIGALLFDSGETAEATRLKRTARRRYTRRKNRICYLQEIFSNEMAKVDDSFFHRLEESFLVEEDKKHERHPIFGNIVDEVAYHEKYPTIYHLRKKLVDSTDKADLRLIYLALAHMIKFRGHFLIEGDLNPDNSDVDKLFIQLVQTYNQLFEENPINASGVDAKAILSARLSKSRRLENLIAQLPGEKKNGLFGNLIALSLGLTPNFKSNFDLAEDAKLQLSKDTYDDDLDNLLAQIGDQYADLFLAAKNLSDAILLSDILRVNTEITKAPLSASMIKRYDEHHQDLTLLKALVRQQLPEKYKEIFFDQSKNGYAGYIDGGASQEEFYKFIKPILEKMDGTEELLVKLNREDLLRKQRTFDNGSIPHQIHLGELHAILRRQEDFYPFLKDNREKIEKILTFRIPYYVGPLARGNSRFAWMTRKSEETITPWNFEEVVDKGASAQSFIERMTNFDKNLPNEKVLPKHSLLYEYFTVYNELTKVKYVTEGMRKPAFLSGEQKKAIVDLLFKTNRKVTVKQLKEDYFKKIECFDSVEISGVEDRFNASLGTYHDLLKIIKDKDFLDNEENEDILEDIVLTLTLFEDREMIEERLKTYAHLFDDKVMKQLKRRRYTGWGRLSRKLINGIRDKQSGKTILDFLKSDGFANRNFMQLIHDDSLTFKEDIQKAQVSGQGDSLHEHIANLAGSPAIKKGILQTVKVVDELVKVMGRHKPENIVIEMARENQTTQKGQKNSRERMKRIEEGIKELGSQILKEHPVENTQLQNEKLYLYYLQNGRDMYVDQELDINRLSDYDVDHIVPQSFLADDSIDNKVLTRSDKNRGKSDNVPSEEVVKKMKNYWRQLLNAKLITQRKFDNLTKAERGGLSELDKAGFIKRQLVETRQITKHVAQILDSRMNTKYDENDKLIREVKVITLKSKLVSDFRKDFQFYKVREINNYHHAHDAYLNAVVGTALIKKYPALESEFVYGDYKVYDVRKMIAKSEQEIGKATAKYFFYSNIMNFFKTEITLANGEIRKAPLIETNGETGEIVWDKGRDFATVRKVLSMPQVNIVKKTEVQTGGFSKESILPKRNSDKLIARKKDWDPKKYGGFDSPTVAYSVLVVAKVEKGKSKKLKSVKELLGITIMERSSFEKNPIDFLEAKGYKEVKKDLIIKLPKYSLFELENGRKRMLASAGELQKGNELALPSKYVNFLYLASHYEKLKGSPEDNEQKQLFVEQHKHYLDEIIEQISEFSKRVILADANLDKVLSAYNKHRDKPIREQAENIIHLFTLTNLGAPAAFKYFDTTIDRKRYTSTKEVLDATLIHQSITGLYETRIDLSQLGGDSRADPKKKRKVHHHHHH

SEQ ID NO: 7831 - protein, 1393 aa, Artificial Sequence
  source: /note="Description of Artificial Sequence: Synthetic polypeptide"
MAPKKKRKVDKKYSIGLDIGTNSVGWAVITDEYKVPSKKFKVLGNTDRHSIKKNLIGALLFDSGETAEATRLKRTARRRYTRRKNRICYLQEIFSNEMAKVDDSFFHRLEESFLVEEDKKHERHPIFGNIVDEVAYHEKYPTIYHLRKKLVDSTDKADLRLIYLALAHMIKFRGHFLIEGDLNPDNSDVDKLFIQLVQTYNQLFEENPINASGVDAKAILSARLSKSRRLENLIAQLPGEKKNGLFGNLIALSLGLTPNFKSNFDLAEDAKLQLSKDTYDDDLDNLLAQIGDQYADLFLAAKNLSDAILLSDILRVNTEITKAPLSASMIKRYDEHHQDLTLLKALVRQQLPEKYKEIFFDQSKNGYAGYIDGGASQEEFYKFIKPILEKMDGTEELLVKLNREDLLRKQRTFDNGSIPHQIHLGELHAILRRQEDFYPFLKDNREKIEKILTFRIPYYVGPLARGNSRFAWMTRKSEETITPWNFEEVVDKGASAQSFIERMTAFDKNLPNEKVLPKHSLLYEYFTVYNELTKVKYVTEGMRKPAFLSGEQKKAIVDLLFKTNRKVTVKQLKEDYFKKIECFDSVEISGVEDRFNASLGTYHDLLKIIKDKDFLDNEENEDILEDIVLTLTLFEDREMIEERLKTYAHLFDDKVMKQLKRRRYTGWGALSRKLINGIRDKQSGKTILDFLKSDGFANRNFMALIHDDSLTFKEDIQKAQVSGQGDSLHEHIANLAGSPAIKKGILQTVKVVDELVKVMGRHKPENIVIEMARENQTTQKGQKNSRERMKRIEEGIKELGSQILKEHPVENTQLQNEKLYLYYLQNGRDMYVDQELDINRLSDYDVDHIVPQSFLKDDSIDNKVLTRSDKNRGKSDNVPSEEVVKKMKNYWRQLLNAKLITQRKFDNLTKAERGGLSELDKAGFIKRQLVETRAITKHVAQILDSRMNTKYDENDKLIREVKVITLKSKLVSDFRKDFQFYKVREINNYHHAHDAYLNAVVGTALIKKYPKLESEFVYGDYKVYDVRKMIAKSEQEIGKATAKYFFYSNIMNFFKTEITLANGEIRKRPLIETNGETGEIVWDKGRDFATVRKVLSMPQVNIVKKTEVQTGGFSKESILPKRNSDKLIARKKDWDPKKYGGFDSPTVAYSVLVVAKVEKGKSKKLKSVKELLGITIMERSSFEKNPIDFLEAKGYKEVKKDLIIKLPKYSLFELENGRKRMLASAGELQKGNELALPSKYVNFLYLASHYEKLKGSPEDNEQKQLFVEQHKHYLDEIIEQISEFSKRVILADANLDKVLSAYNKHRDKPIREQAENIIHLFTLTNLGAPAAFKYFDTTIDRKRYTSTKEVLDATLIHQSITGLYETRIDLSQLGGDSRADPKKKRKVHHHHHH
